United States Patent Application Publication US 2018/0126003 A1 - sequence listing, part 192

SEQ ID NO: 344414 - DNA, 6861 bp, Artificial Sequence
  derived and/or modified sequence
gggctcagccgcggagtgagcgagggagacgggaggagccgaacccggcgccatccgccgccatcctcccccgccccaccgccatcccgtcccggggagcccctaggcccgggtcccggatccccgcgcacccggccaggctctggcacgttttgggggaggtgcctgcaggacccaacatactcaatgagcttccagcgcaatgtccgatcgctcggggccgactgccaagggaaaggatggaaagaagtattcctcgctcaacctgtttgatacgtataagggcaagtccttagagatccagaaacccgctgttgcccctcgccatggcctgcagagtctcgggaaagttgccattgcccggcgtatgccacctccagccaaccttccaagcctgaaagccgagaacaaaggcaatgaccccaatgtctcactagtgccaaaagacggaacaggatgggcaagcaaacaggagcagtccgaccccaagagttccgatgcctcaaccgctcagccgccggaatcgcagccactgccggcttcacagacgcctgcctccaaccagccgaaacgacccccagcagcccccgagaacactcctttggttccaagcggggtaaagtcctgggcacaagccagcgtcacccatggagcacatggagatggtggaagggcatcaagcctactgtcacgattctctcgagaggaatttccgaccctgcaggcggctggcgaccaggacaaggctgccaaggaaagggagtctgccgaacagtcgtctgggcccggaccaagcctccgcccccaaaattctacaacttggagggacggaggtgggcgtggccctgatgagctggagggcccggactccaaacttcatcatggtcatgatccccggggtgggctacagccttcaggcccaccccagttccctccctaccgcggaatgatgccgcctttcatgtatcccccatatctcccgttccctccgccctatggaccccaggggccttaccgataccccactcctgatgggcccagccgttttccccgtgtggcgggcccccgaggctcagggccaccaatgcgcttagtagagcctgtgggtcgtccctctattctcaaagaggataatctcaaagagtttgatcagttggatcaggagaatgatgatggttgggcaggggcccatgaagaggttgactacactgaaaagctcaagttcagcgatgaggaagatgggcgagactctgatgaggagggagctgagggccacagggattcccaatcagcttctggtgaggaacggccccctgaagcagatggcaaaaagggcaactcccccaacagcgaaccgcccactcctaagacggcctgggcagaaacctctcggcctccagagacagagccgggacctcctgccccaaagcctcccctacccccacctcaccggggccccgccgggaactggggcccccctggggactacccagatcgtgggggtcctccctgcaagcccccagcacctgaagatgaggatgaggcatggcggcagcgacgaaagcagtcgtcatctgagatttccctggcagtggagcgggcccggcgacggcgagaagaagaggagcggcgcatgcaagaagagcgccgggcagcctgtgctgagaagctcaagcgactcgatgaaaagtttggggcacctgacaagcggctcaaagcagagcctgctgccccacctgctgccccttctaccccagctccaccacctgcagtccctaaagaactccctgcacctccagctccacctccagcatcagccccaacaccagagaaagaacctgaagagccagcacaggcccctcctgcccaatctactcctactccaggtgtggctgcggctcccactctggtgagtggtggtggcagtaccagtagcaccagcagtggcagcttcgaagccagcccagtggaaccacaactgccctcaaaagagggtcctgaaccaccagaagaggttcctcctcctaccacacccccagttccaaaggtggaacccaagggtgatgggattggtcccacccgccagccccctagtcagggcttgggctaccccaaatatcagaagtcgttgcctcctcgtttccagcggcagcagcaggagcagctcctgaagcagcagcagcagcaccagtggcagcagcatcaacagggctctgcccctcctaccccagtgcccccatcaccaccacagcctgtgaccctgggggctgtgccagctccacaggctccacccccgccccccaaggccctgtacccaggtgctctgggccggcccccacccatgcccccaatgaactttgatccccgatggatgatgattcctccttatgtggacccccggctcctccagggtcgtccccctctagacttctaccctcctggtgtgcatccctctggcctagttccccgagagcgttcagacagtgggggctcaagctcagagccatttgaccgtcatgcacctgctatgttacgggaacggggcactccaccggtggatccaaagttggcctgggtgggagatgtcttcaccgccacacccgctgaaccccgcccacttacctcacctctgcgccaggctgcggatgaggatgacaaggggatgaggagcgagactcctccagtacctcccccaccaccctatctggccagttatccaggctttcctgagaatggagcccctgggcccccaatctctcgctttcctctggaggaaccagggccccgtccactcccctggcccccaggcagtgatgaagtggccaagatacaaactccaccacccaagaaggagccccctaaggaggagactgcacagctgacggggccagaagcaggccgaaagcctgcccgcggagtcgggagtggaggccagggccccccaccaccacgcagagagagtcgcacagagacccgctggggccctcgtccagggagcagtcgtcgtggaatccctccagaggagccaggggccccaccccgccgggctgggcctataaagaaacctccaccacctacaaaagtagaagagctgcctcccaagcccctcgaacagggggatgaaacccccaaacccccaaagccagacccactcaagataaccaaggggaagctagggggccccaaggagaccccacccaatggaaatctttcccctgccccaaggcttcggagggactattcgtatgaaagagtgggtcctacctcttgccggggtcggggccgaggcgagtattttgccagagggaggggttttcgggggacctatgggggacgagggcggggagcccgaagccgggaattccgcagttaccgagagtttcgaggagatgatgggcgtggaggtgggacagggggaccaaaccaccctcctgctccccgaggccgcactgccagcgagacacggagcgagggttcagagtatgaggaaatccccaagcggcgccggcagcggggctcagaaacaggcagcgagacccatgagagtgatctggctccttcagacaaggaggctcccacacccaaggagggaacactcacccaggtccctctcgctcccccaccaccaggagccccaccttcaccagccccagcccgcttcactgcccggggtgggcgagtcttcactcccagaggggtgccatctcgccggggccgaggaggagggaggccccctcctcaagtttgcccaggctggagccctccagccaagtctctggctcccaagaaacctcccacaggccctttgccaccaagtaaggagcctttgaaagagaagttgatcccagggcctctgtcccctgtggcgcgcggaggcagcaatggaggtagcaatgtgggcatggaagatggggagcgaccccgaaggaggcgacatgggagggctcagcagcaggataaaccgcctcgtttccggaggctgaagcaggaacgggagaatgccgcaagggggtctgagggcaagccctccctaacccttccagcctccgctcctggacctgaggaggccctcacaacagtcacagtggccccagcacctcgccgggcagctgccaagtctcctgatctgtcaaaccagaactcagaccaagccaatgaggaatgggagactgcatcagagagcagtgacttcaccagtgagcgccgaggggacaaagaggcacccccaccagtactgctgacacccaaggctgtgggaactcctgggggaggtggaggtggagccgtaccaggtatttcagccatgtcccgcggagatctgagccagagagccaaggatttgagtaaacggagcttctcaagtcagcggccaggcatggaacggcagaatcggcgccctggcccagggggcaaggctggcagcagtggcagcagcagtggaggaggcggtgggggtcctggaggaaggaccgggccaggacgaggcgacaagaggagctggccctctcccaagaaccgaagtcgtcctccagaggagcgtcccccggggcttcccctgcctcccccacctcccagcagttctgctgtcttccgcctggaccaagttatccacagcaaccctgctggcatccaacaggctctggcccagcttagtagccgtcaagggagtgtaactgcaccagggggtcatccaaggcacaagcctgggcctccccaagcccctcagggcccctctcctaggcccccaacccgatacgagccccagagggtcaacagcggcctcagttctgacccccactttgaggagccggggccaatggtgagaggggtgggtgggactcctcgggactctgccggggttagtccctttccccctaaacgtcgggagcggcctcccagaaaaccagagctgctacaggaggaatctttgccacctcctcatagctctggattcttgggctctaagcctgagggcccaggccctcaggcagagtccagagatacaggcacagaggccctgacccctcacatctggaaccgtttacatactgccactagccgaaagagttaccggcccagctccatggagccttggatggagcccctgagtccttttgaggatgtggctggcacagaaatgagtcagtctgacagtggggtggacctgagtggggattctcaggtgtcatcaggtccctgcagccagcgaagttcccctgatggaggactcaagggggcagcagagggaccccccaagaggcctggaggctcctcacccctgaatgctgttccttgtgagggtccacctggctctgaacctcctaggagaccaccacctgccccccacgatggggacagaaaggagctgccccgggagcagcctctgccccctggccccattggcacagaacgatcacagcatacagaccgaggcacagagcctggccccattcggccatcccatcgacctggtcccccagtccagtttggcactagtgacaaggactcagacttacgcctagtggtaggagacagcttgaaagcagagaaggagctaacagcatcagtcactgaggccattcctgtatcacgagactgggagctgcttcccagtgctgctgcctctgctgagccacaatccaagaacctggattctgggcactgtgtcccggagcccagctcctcaggccagcgcctgtatcctgaggttttctatggcagtgctgggccttccagttctcagatctctgggggagccatggactctcagttacatccaaacagtggaggcttccgccctgggacaccctcactgcacccttacagatcacagcccctatacctaccccccggcccagcccctccctcagcactgctctctggggtagctctcaagggccagtttctggatttctccacaatgcaagctacagagctggggaagttgccggctggaggagttctctaccctccaccttccttcctctactctccggctttctgccccagtcctttgcctgacacatcgttgcttcaggtacgccaggatctgccatccccttcggatttttattctactcctctgcagcctggtggccaaagtggctttctcccttcaggggctcctgcccagcagatgcttctacccatggtagactcacagctgcctgtggtgaactttggctccctgccgccagcaccacctcctgccccaccttccctttctctgttacctgtgggccctgctctgcagccccccagcctggctgtgcggcccccacctgctcctgctactcgggtgctgccttcacctgccaggcccttccccgctagcttggggcgagcagagctgcatccagtggaactaaagccgttccaggattatcaaaaactgagcagcaaccttgggggacctggatcatcacggactcccccaactggaaggtccttctctggcctcaattcccgtctcaaggccacgccttccacctacagtggagtcttccgcacccagcgcgtcgacctttaccagcaggcctccccaccagatgccctgcgctggatacctaagccttgggagcggacagggccgccacctcgagaagggccctcccgacgggcagaggagcctgggtcccgaggggacaaggagcctgggttgcccccaccccgctgagggagttcctcttgccccctacccccggggcttgtatatagattataaatatataagggggaaaggggtgggcggggaggggttctggggctggggcctcacttcccctcctcccccttcccctggtcccctgtccctggggctgtttgttaaaaaagagtaataaaaggatttaaaaaaaaaaa

SEQ ID NO: 344415 - DNA, 6893 bp, Artificial Sequence
  derived and/or modified sequence
cagccgcggagtgagcgagggagacgggaggagccgaacccggcgccatccgccgccatcctcccccgccccaccgccatcccgtcccggggagcccctaggcccgggtcccggatccccgcgcacccggccaggggacagagactgagacacttgctgtctggcccacaggctctggcacgttttgggggaggtgcctgcaggacccaacatactcaatgagcttccagcgcaatgtccgatcgctcggggccgactgccaagggaaaggatggaaagaagtattcctcgctcaacctgtttgatacgtataagggcaagtccttagagatccagaaacccgctgttgcccctcgccatggcctgcagagtctcgggaaagttgccattgcccggcgtatgccacctccagccaaccttccaagcctgaaagccgagaacaaaggcaatgaccccaatgtctcactagtgccaaaagacggaacaggatgggcaagcaaacaggagcagtccgaccccaagagttccgatgcctcaaccgctcagccgccggaatcgcagccactgccggcttcacagacgcctgcctccaaccagccgaaacgacccccagcagcccccgagaacactcctttggttccaagcggggtaaagtcctgggcacaagccagcgtcacccatggagcacatggagatggtggaagggcatcaagcctactgtcacgattctctcgagaggaatttccgaccctgcaggcggctggcgaccaggacaaggctgccaaggaaagggagtctgccgaacagtcgtctgggcccggaccaagcctccgcccccaaaattctacaacttggagggacggaggtgggcgtggccctgatgagctggagggcccggactccaaacttcatcatggtcatgatccccggggtgggctacagccttcaggcccaccccagttccctccctaccgcggaatgatgccgcctttcatgtatcccccatatctcccgttccctccgccctatggaccccaggggccttaccgataccccactcctgatgggcccagccgttttccccgtgtggcgggcccccgaggctcagggccaccaatgcgcttagtagagcctgtgggtcgtccctctattctcaaagaggataatctcaaagagtttgatcagttggatcaggagaatgatgatggttgggcaggggcccatgaagaggttgactacactgaaaagctcaagttcagcgatgaggaagatgggcgagactctgatgaggagggagctgagggccacagggattcccaatcagcttctggtgaggaacggccccctgaagcagatggcaaaaagggcaactcccccaacagcgaaccgcccactcctaagacggcctgggcagaaacctctcggcctccagagacagagccgggacctcctgccccaaagcctcccctacccccacctcaccggggccccgccgggaactggggcccccctggggactacccagatcgtgggggtcctccctgcaagcccccagcacctgaagatgaggatgaggcatggcggcagcgacgaaagcagtcgtcatctgagatttccctggcagtggagcgggcccggcgacggcgagaagaagaggagcggcgcatgcaagaagagcgccgggcagcctgtgctgagaagctcaagcgactcgatgaaaagtttggggcacctgacaagcggctcaaagcagagcctgctgccccacctgctgccccttctaccccagctccaccacctgcagtccctaaagaactccctgcacctccagctccacctccagcatcagccccaacaccagagaaagaacctgaagagccagcacaggcccctcctgcccaatctactcctactccaggtgtggctgcggctcccactctggtgagtggtggtggcagtaccagtagcaccagcagtggcagcttcgaagccagcccagtggaaccacaactgccctcaaaagagggtcctgaaccaccagaagaggttcctcctcctaccacacccccagttccaaaggtggaacccaagggtgatgggattggtcccacccgccagccccctagtcagggcttgggctaccccaaatatcagaagtcgttgcctcctcgtttccagcggcagcagcaggagcagctcctgaagcagcagcagcagcaccagtggcagcagcatcaacagggctctgcccctcctaccccagtgcccccatcaccaccacagcctgtgaccctgggggctgtgccagctccacaggctccacccccgccccccaaggccctgtacccaggtgctctgggccggcccccacccatgcccccaatgaactttgatccccgatggatgatgattcctccttatgtggacccccggctcctccagggtcgtccccctctagacttctaccctcctggtgtgcatccctctggcctagttccccgagagcgttcagacagtgggggctcaagctcagagccatttgaccgtcatgcacctgctatgttacgggaacggggcactccaccggtggatccaaagttggcctgggtgggagatgtcttcaccgccacacccgctgaaccccgcccacttacctcacctctgcgccaggctgcggatgaggatgacaaggggatgaggagcgagactcctccagtacctcccccaccaccctatctggccagttatccaggctttcctgagaatggagcccctgggcccccaatctctcgctttcctctggaggaaccagggccccgtccactcccctggcccccaggcagtgatgaagtggccaagatacaaactccaccacccaagaaggagccccctaaggaggagactgcacagctgacggggccagaagcaggccgaaagcctgcccgcggagtcgggagtggaggccagggccccccaccaccacgcagagagagtcgcacagagacccgctggggccctcgtccagggagcagtcgtcgtggaatccctccagaggagccaggggccccaccccgccgggctgggcctataaagaaacctccaccacctacaaaagtagaagagctgcctcccaagcccctcgaacagggggatgaaacccccaaacccccaaagccagacccactcaagataaccaaggggaagctagggggccccaaggagaccccacccaatggaaatctttcccctgccccaaggcttcggagggactattcgtatgaaagagtgggtcctacctcttgccggggtcggggccgaggcgagtattttgccagagggaggggttttcgggggacctatgggggacgagggcggggagcccgaagccgggaattccgcagttaccgagagtttcgaggagatgatgggcgtggaggtgggacagggggaccaaaccaccctcctgctccccgaggccgcactgccagcgagacacggagcgagggttcagagtatgaggaaatccccaagcggcgccggcagcggggctcagaaacaggcagcgagacccatgagagtgatctggctccttcagacaaggaggctcccacacccaaggagggaacactcacccaggtccctctcgctcccccaccaccaggagccccaccttcaccagccccagcccgcttcactgcccggggtgggcgagtcttcactcccagaggggtgccatctcgccggggccgaggaggagggaggccccctcctcaagtttgcccaggctggagccctccagccaagtctctggctcccaagaaacctcccacaggccctttgccaccaagtaaggagcctttgaaagagaagttgatcccagggcctctgtcccctgtggcgcgcggaggcagcaatggaggtagcaatgtgggcatggaagatggggagcgaccccgaaggaggcgacatgggagggctcagcagcaggataaaccgcctcgtttccggaggctgaagcaggaacgggagaatgccgcaagggggtctgagggcaagccctccctaacccttccagcctccgctcctggacctgaggaggccctcacaacagtcacagtggccccagcacctcgccgggcagctgccaagtctcctgatctgtcaaaccagaactcagaccaagccaatgaggaatgggagactgcatcagagagcagtgacttcaccagtgagcgccgaggggacaaagaggcacccccaccagtactgctgacacccaaggctgtgggaactcctgggggaggtggaggtggagccgtaccaggtatttcagccatgtcccgcggagatctgagccagagagccaaggatttgagtaaacggagcttctcaagtcagcggccaggcatggaacggcagaatcggcgccctggcccagggggcaaggctggcagcagtggcagcagcagtggaggaggcggtgggggtcctggaggaaggaccgggccaggacgaggcgacaagaggagctggccctctcccaagaaccgaagtcgtcctccagaggagcgtcccccggggcttcccctgcctcccccacctcccagcagttctgctgtcttccgcctggaccaagttatccacagcaaccctgctggcatccaacaggctctggcccagcttagtagccgtcaagggagtgtaactgcaccagggggtcatccaaggcacaagcctgggcctccccaagcccctcagggcccctctcctaggcccccaacccgatacgagccccagagggtcaacagcggcctcagttctgacccccactttgaggagccggggccaatggtgagaggggtgggtgggactcctcgggactctgccggggttagtccctttccccctaaacgtcgggagcggcctcccagaaaaccagagctgctacaggaggaatctttgccacctcctcatagctctggattcttgggctctaagcctgagggcccaggccctcaggcagagtccagagatacaggcacagaggccctgacccctcacatctggaaccgtttacatactgccactagccgaaagagttaccggcccagctccatggagccttggatggagcccctgagtccttttgaggatgtggctggcacagaaatgagtcagtctgacagtggggtggacctgagtggggattctcaggtgtcatcaggtccctgcagccagcgaagttcccctgatggaggactcaagggggcagcagagggaccccccaagaggcctggaggctcctcacccctgaatgctgttccttgtgagggtccacctggctctgaacctcctaggagaccaccacctgccccccacgatggggacagaaaggagctgccccgggagcagcctctgccccctggccccattggcacagaacgatcacagcatacagaccgaggcacagagcctggccccattcggccatcccatcgacctggtcccccagtccagtttggcactagtgacaaggactcagacttacgcctagtggtaggagacagcttgaaagcagagaaggagctaacagcatcagtcactgaggccattcctgtatcacgagactgggagctgcttcccagtgctgctgcctctgctgagccacaatccaagaacctggattctgggcactgtgtcccggagcccagctcctcaggccagcgcctgtatcctgaggttttctatggcagtgctgggccttccagttctcagatctctgggggagccatggactctcagttacatccaaacagtggaggcttccgccctgggacaccctcactgcacccttacagatcacagcccctatacctaccccccggcccagcccctccctcagcactgctctctggggtagctctcaagggccagtttctggatttctccacaatgcaagctacagagctggggaagttgccggctggaggagttctctaccctccaccttccttcctctactctccggctttctgccccagtcctttgcctgacacatcgttgcttcaggtacgccaggatctgccatccccttcggatttttattctactcctctgcagcctggtggccaaagtggctttctcccttcaggggctcctgcccagcagatgcttctacccatggtagactcacagctgcctgtggtgaactttggctccctgccgccagcaccacctcctgccccaccttccctttctctgttacctgtgggccctgctctgcagccccccagcctggctgtgcggcccccacctgctcctgctactcgggtgctgccttcacctgccaggcccttccccgctagcttggggcgagcagagctgcatccagtggaactaaagccgttccaggattatcaaaaactgagcagcaaccttgggggacctggatcatcacggactcccccaactggaaggtccttctctggcctcaattcccgtctcaaggccacgccttccacctacagtggagtcttccgcacccagcgcgtcgacctttaccagcaggcctccccaccagatgccctgcgctggatacctaagccttgggagcggacagggccgccacctcgagaagggccctcccgacgggcagaggagcctgggtcccgaggggacaaggagcctgggttgcccccaccccgctgagggagttcctcttgccccctacccccggggcttgtatatagattataaatatataagggggaaaggggtgggcggggaggggttgtggggctggggcctcacttcccctcctcccccttcccctggtcccctgtccctggggctgtttgttaaaaaagagtaataaaaggatttaaaaaaaaaaa

SEQ ID NO: 344416 - DNA, 6861 bp, Artificial Sequence
  derived and/or modified sequence
gggctcagccgcggagtgagcgagggagacgggaggagccgaacccggcgccatccgccgccatcctcccccgccccaccgccatcccgtcccggggagcccctaggcccgggtcccggatccccgcgcacccggccaggctctggcacgttttgggggaggtgcctgcaggacccaacatactcaatgagcttccagcgcaatgtccgatcgctcggggccgactgccaagggaaaggatggaaagaagtattcctcgctcaacctgtttgatacgtataagggcaagtccttagagatccagaaacccgctgttgcccctcgccatggcctgcagagtctcgggaaagttgccattgcccggcgtatgccacctccagccaaccttccaagcctgaaagccgagaacaaaggcaatgaccccaatgtctcactagtgccaaaagacggaacaggatgggcaagcaaacaggagcagtccgaccccaagagttccgatgcctcaaccgctcagccgccggaatcgcagccactgccggcttcacagacgcctgcctccaaccagccgaaacgacccccagcagcccccgagaacactcctttggttccaagcggggtaaagtcctgggcacaagccagcgtcacccatggagcacatggagatggtggaagggcatcaagcctactgtcacgattctctcgagaggaatttccgaccctgcaggcggctggcgaccaggacaaggctgccaaggaaagggagtctgccgaacagtcgtctgggcccggaccaagcctccgcccccaaaattctacaacttggagggacggaggtgggcgtggccctgatgagctggagggcccggactccaaacttcatcatggtcatgatccccggggtgggctacagccttcaggcccaccccagttccctccctaccgcggaatgatgccgcctttcatgtatcccccatatctcccgttccctccgccctatggaccccaggggccttaccgataccccactcctgatgggcccagccgttttccccgtgtggcgggcccccgaggctcagggccaccaatgcgcttagtagagcctgtgggtcgtccctctattctcaaagaggataatctcaaagagtttgatcagttggatcaggagaatgatgatggttgggcaggggcccatgaagaggttgactacactgaaaagctcaagttcagcgatgaggaagatgggcgagactctgatgaggagggagctgagggccacagggattcccaatcagcttctggtgaggaacggccccctgaagcagatggcaaaaagggcaactcccccaacagcgaaccgcccactcctaagacggcctgggcagaaacctctcggcctccagagacagagccgggacctcctgccccaaagcctcccctacccccacctcaccggggccccgccgggaactggggcccccctggggactacccagatcgtgggggtcctccctgcaagcccccagcacctgaagatgaggatgaggcatggcggcagcgacgaaagcagtcgtcatctgagatttccctggcagtggagcgggcccggcgacggcgagaagaagaggagcggcgcatgcaagaagagcgccgggcagcctgtgctgagaagctcaagcgactcgatgaaaagtttggggcacctgacaagcggctcaaagcagagcctgctgccccacctgctgccccttctaccccagctccaccacctgcagtccctaaagaactccctgcacctccagctccacctccagcatcagccccaacaccagagaaagaacctgaagagccagcacaggcccctcctgcccaatctactcctactccaggtgtggctgcggctcccactctggtgagtggtggtggcagtaccagtagcaccagcagtggcagcttcgaagccagcccagtggaaccacaactgccctcaaaagagggtcctgaaccaccagaagaggttcctcctcctaccacacccccagttccaaaggtggaacccaagggtgatgggattggtcccacccgccagccccctagtcagggcttgggctaccccaaatatcagaagtcgttgcctcctcgtttccagcggcagcagcaggagcagctcctgaagcagcagcagcagcaccagtggcagcagcatcaacagggctctgcccctcctaccccagtgcccccatcaccaccacagcctgtgaccctgggggctgtgccagctccacaggctccacccccgccccccaaggccctgtacccaggtgctctgggccggcccccacccatgcccccaatgaactttgatccccgatggatgatgattcctccttatgtggacccccggctcctccagggtcgtccccctctagacttctaccctcctggtgtgcatccctctggcctagttccccgagagcgttcagacagtgggggctcaagctcagagccatttgaccgtcatgcacctgctatgttacgggaacggggcactccaccggtggatccaaagttggcctgggtgggagatgtcttcaccgccacacccgctgaaccccgcccacttacctcacctctgcgccaggctgcggatgaggatgacaaggggatgaggagcgagactcctccagtacctcccccaccaccctatctggccagttatccaggctttcctgagaatggagcccctgggcccccaatctctcgctttcctctggaggaaccagggccccgtccactcccctggcccccaggcagtgatgaagtggccaagatacaaactccaccacccaagaaggagccccctaaggaggagactgcacagctgacggggccagaagcaggccgaaagcctgcccgcggagtcgggagtggaggccagggccccccaccaccacgcagagagagtcgcacagagacccgctggggccctcgtccagggagcagtcgtcgtggaatccctccagaggagccaggggccccaccccgccgggctgggcctataaagaaacctccaccacctacaaaagtagaagagctgcctcccaagcccctcgaacagggggatgaaacccccaaacccccaaagccagacccactcaagataaccaaggggaagctagggggccccaaggagaccccacccaatggaaatctttcccctgccccaaggcttcggagggactattcgtatgaaagagtgggtcctacctcttgccggggtcggggccgaggcgagtattttgccagagggaggggttttcgggggacctatgggggacgagggcggggagcccgaagccgggaattccgcagttaccgagagtttcgaggagatgatgggcgtggaggtgggacagggggaccaaaccaccctcctgctccccgaggccgcactgccagcgagacacggagcgagggttcagagtatgaggaaatccccaagcggcgccggcagcggggctcagaaacaggcagcgagacccatgagagtgatctggctccttcagacaaggaggctcccacacccaaggagggaacactcacccaggtccctctcgctcccccaccaccaggagccccaccttcaccagccccagcccgcttcactgcccggggtgggcgagtcttcactcccagaggggtgccatctcgccggggccgaggaggagggaggccccctcctcaagtttgcccaggctggagccctccagccaagtctctggctcccaagaaacctcccacaggccctttgccaccaagtaaggagcctttgaaagagaagttgatcccagggcctctgtcccctgtggcgcgcggaggcagcaatggaggtagcaatgtgggcatggaagatggggagcgaccccgaaggaggcgacatgggagggctcagcagcaggataaaccgcctcgtttccggaggctgaagcaggaacgggagaatgccgcaagggggtctgagggcaagccctccctaacccttccagcctccgctcctggacctgaggaggccctcacaacagtcacagtggccccagcacctcgccgggcagctgccaagtctcctgatctgtcaaaccagaactcagaccaagccaatgaggaatgggagactgcatcagagagcagtgacttcaccagtgagcgccgaggggacaaagaggcacccccaccagtactgctgacacccaaggctgtgggaactcctgggggaggtggaggtggagccgtaccaggtatttcagccatgtcccgcggagatctgagccagagagccaaggatttgagtaaacggagcttctcaagtcagcggccaggcatggaacggcagaatcggcgccctggcccagggggcaaggctggcagcagtggcagcagcagtggaggaggcggtgggggtcctggaggaaggaccgggccaggacgaggcgacaagaggagctggccctctcccaagaaccgaagtcgtcctccagaggagcgtcccccggggcttcccctgcctcccccacctcccagcagttctgctgtcttccgcctggaccaagttatccacagcaaccctgctggcatccaacaggctctggcccagcttagtagccgtcaagggagtgtaactgcaccagggggtcatccaaggcacaagcctgggcctccccaagcccctcagggcccctctcctaggcccccaacccgatacgagccccagagggtcaacagcggcctcagttctgacccccactttgaggagccggggccaatggtgagaggggtgggtgggactcctcgggactctgccggggttagtccctttccccctaaacgtcgggagcggcctcccagaaaaccagagctgctacaggaggaatctttgccacctcctcatagctctggattcttgggctctaagcctgagggcccaggccctcaggcagagtccagagatacaggcacagaggccctgacccctcacatctggaaccgtttacatactgccactagccgaaagagttaccggcccagctccatggagccttggatggagcccctgagtccttttgaggatgtggctggcacagaaatgagtcagtctgacagtggggtggacctgagtggggattctcaggtgtcatcaggtccctgcagccagcgaagttcccctgatggaggactcaagggggcagcagagggaccccccaagaggcctggaggctcctcacccctgaatgctgttccttgtgagggtccacctggctctgaacctcctaggagaccaccacctgccccccacgatggggacagaaaggagctgccccgggagcagcctctgccccctggccccattggcacagaacgatcacagcatacagaccgaggcacagagcctggccccattcggccatcccatcgacctggtcccccagtccagtttggcactagtgacaaggactcagacttacgcctagtggtaggagacagcttgaaagcagagaaggagctaacagcatcagtcactgaggccattcctgtatcacgagactgggagctgcttcccagtgctgctgcctctgctgagccacaatccaagaacctggattctgggcactgtgtcccggagcccagctcctcaggccagcgcctgtatcctgaggttttctatggcagtgctgggccttccagttctcagatctctgggggagccatggactctcagttacatccaaacagtggaggcttccgccctgggacaccctcactgcacccttacagatcacagcccctatacctaccccccggcccagcccctccctcagcactgctctctggggtagctctcaagggccagtttctggatttctccacaatgcaagctacagagctggggaagttgccggctggaggagttctctaccctccaccttccttcctctactctccggctttctgccccagtcctttgcctgacacatcgttgcttcaggtacgccaggatctgccatccccttcggatttttattctactcctctgcagcctggtggccaaagtggctttctcccttcaggggctcctgcccagcagatgcttctacccatggtagactcacagctgcctgtggtgaactttggctccctgccgccagcaccacctcctgccccaccttccctttctctgttacctgtgggccctgctctgcagccccccagcctggctgtgcggcccccacctgctcctgctactcgggtgctgccttcacctgccaggcccttccccgctagcttggggcgagcagagctgcatccagtggaactaaagccgttccaggattatcaaaaactgagcagcaaccttgggggacctggatcatcacggactcccccaactggaaggtccttctctggcctcaattcccgtctcaaggccacgccttccacctacagtggagtcttccgcacccagcgcgtcgacctttaccagcaggcctccccaccagatgccctgcgctggatacctaagccttgggagcggacagggccgccacctcgagaagggccctcccgacgggcagaggagcctgggtcccgaggggacaaggagcctgggttgcccccaccccgctgagggagttcctcttgccccctacccccggggcttgtatatagattataaatatataagggggaaaggggtgggcggggaggggttgtggggctggggcctcacttcccctcctcccccttcccctggtcccctgtccctggggctgtttgttaaaaaagagtaataaaaggatttaaaaaaaaaaa

SEQ ID NO: 344417 - DNA, 6840 bp, Artificial Sequence
  derived and/or modified sequence
agggggtgctcccgggggcggcggttgcccggatgggccgttagtcggggctcagccgcggagtgagcgagggagacgggaggagccgaacccggcgccatccgccgccatcctcccccgccccaccgccatcccgtcccggggagcccctaggcccgggtcccggatccccgcgcacccggccaggctctggcacgttttgggggaggtgcctgcaggacccaacatactcaatgagcttccagcgcaatgtccgatcgctcggggccgactgccaagggaaaggatggaaagaagtattcctcgctcaacctgtttgatacgtataagggcaagtccttagagatccagaaacccgctgttgcccctcgccatggcctgcagagtctcgggaaagttgccattgcccggcgtatgccacctccagccaaccttccaagcctgaaagccgagaacaaaggcaatgaccccaatgtctcactagtgccaaaagacggaacaggatgggcaagcaaacaggagcagtccgaccccaagagttccgatgcctcaaccgctcagccgccggaatcgcagccactgccggcttcacagacgcctgcctccaaccagccgaaacgacccccagcagcccccgagaacactcctttggttccaagcggggtaaagtcctgggcacaagccagcgtcacccatggagcacatggagatggtggaagggcatcaagcctactgtcacgattctctcgagaggaatttccgaccctgcaggcggctggcgaccaggacaaggctgccaaggaaagggagtctgccgaacagtcgtctgggcccggaccaagcctccgcccccaaaattctacaacttggagggacggaggtgggcgtggccctgatgagctggagggcccggactccaaacttcatcatggtcatgatccccggggtgggctacagccttcaggcccaccccagttccctccctaccgcggaatgatgccgcctttcatgtatcccccatatctcccgttccctccgccctatggaccccaggggccttaccgataccccactcctgatgggcccagccgttttccccgtgtggcgggcccccgaggctcagggccaccaatgcgcttagtagagcctgtgggtcgtccctctattctcaaagaggataatctcaaagagtttgatcagttggatcaggagaatgatgatggttgggcaggggcccatgaagaggttgactacactgaaaagctcaagttcagcgatgaggaagatgggcgagactctgatgaggagggagctgagggccacagggattcccaatcagcttctggtgaggaacggccccctgaagcagatggcaaaaagggcaactcccccaacagcgaaccgcccactcctaagacggcctgggcagaaacctctcggcctccagagacagagccgggacctcctgccccaaagcctcccctacccccccctggggactacccagatcgtgggggtcctccctgcaagcccccagcacctgaagatgaggatgaggcatggcggcagcgacgaaagcagtcgtcatctgagatttccctggcagtggagcgggcccggcgacggcgagaagaagaggagcggcgcatgcaagaagagcgccgggcagcctgtgctgagaagctcaagcgactcgatgaaaagtttggggcacctgacaagcggctcaaagcagagcctgctgccccacctgctgccccttctaccccagctccaccacctgcagtccctaaagaactccctgcacctccagctccacctccagcatcagccccaacaccagagaaagaacctgaagagccagcacaggcccctcctgcccaatctactcctactccaggtgtggctgcggctcccactctggtgagtggtggtggcagtaccagtagcaccagcagtggcagcttcgaagccagcccagtggaaccacaactgccctcaaaagagggtcctgaaccaccagaagaggttcctcctcctaccacacccccagttccaaaggtggaacccaagggtgatgggattggtcccacccgccagccccctagtcagggcttgggctaccccaaatatcagaagtcgttgcctcctcgtttccagcggcagcagcaggagcagctcctgaagcagcagcagcagcaccagtggcagcagcatcaacagggctctgcccctcctaccccagtgcccccatcaccaccacagcctgtgaccctgggggctgtgccagctccacaggctccacccccgccccccaaggccctgtacccaggtgctctgggccggcccccacccatgcccccaatgaactttgatccccgatggatgatgattcctccttatgtggacccccggctcctccagggtcgtccccctctagacttctaccctcctggtgtgcatccctctggcctagttccccgagagcgttcagacagtgggggctcaagctcagagccatttgaccgtcatgcacctgctatgttacgggaacggggcactccaccggtggatccaaagttggcctgggtgggagatgtcttcaccgccacacccgctgaaccccgcccacttacctcacctctgcgccaggctgcggatgaggatgacaaggggatgaggagcgagactcctccagtacctcccccaccaccctatctggccagttatccaggctttcctgagaatggagcccctgggcccccaatctctcgctttcctctggaggaaccagggccccgtccactcccctggcccccaggcagtgatgaagtggccaagatacaaactccaccacccaagaaggagccccctaaggaggagactgcacagctgacggggccagaagcaggccgaaagcctgcccgcggagtcgggagtggaggccagggccccccaccaccacgcagagagagtcgcacagagacccgctggggccctcgtccagggagcagtcgtcgtggaatccctccagaggagccaggggccccaccccgccgggctgggcctataaagaaacctccaccacctacaaaagtagaagagctgcctcccaagcccctcgaacagggggatgaaacccccaaacccccaaagccagacccactcaagataaccaaggggaagctagggggccccaaggagaccccacccaatggaaatctttcccctgccccaaggcttcggagggactattcgtatgaaagagtgggtcctacctcttgccggggtcggggccgaggcgagtattttgccagagggaggggttttcgggggacctatgggggacgagggcggggagccgccgggaattccgcagttaccgagagtttcgaggagatgatgggcgtggaggtgggacagggggaccaaaccaccctcctgctccccgaggccgcactgccagcgagacacggagcgagggttcagagtatgaggaaatccccaagcggcgccggcagcggggctcagaaacaggcagcgagacccatgagagtgatctggctccttcagacaaggaggctcccacacccaaggagggaacactcacccaggtcccgctcccccaccaccaggagccccaccttcccagccccagcccgcttcactcccggggtgggcgagtcttcactcccagaggggatctcgccggggccgaggaggagggagcctcctcaagtttgcccaggctggagccctccagccaagtctctggctcccaagaaacctcccacaggccctttgccaccaagtaaggagcctttgaaagagaagttgatcccagggcctctgtcccctgtggcgcgcggaggcagcaatggaggtagcaatgtgggcatggaagatggggagcgaccccgaaggaggcgacatgggagggctcagcagcaggataaaccgcctcgtttccggaggctgaagcaggaacgggagaatgccgcaagggggtctgagggcaagccctccctaacccttccagcctccgctcctggacctgaggaggccctcacaacagtcacagtggccccagcacctcgccgggcagctgccaagtctcctgatctgtcaaaccagaactcagaccaagccaatgaggaatgggagactgcatcagagagcagtgacttcaccagtgagcgccgaggggacaaagaggcacccccaccagtactgctgacacccaaggctgtgggaactcctgggggaggtggaggtggagccgtaccaggtatttcagccatgtcccgcggagatctgagccagagagccaaggatttgagtaaacggagcttctcaagtcagcggccaggcatggaacggcagaatcggcgccctggcccagggggcaaggctggcagcagtggcagcagcagtggaggaggcggtgggggtcctggaggaaggaccgggccaggacgaggcgacaagaggagctggccctctcccaagaaccgaagtcgtcctccagaggagcgtcccccggggcttcccctgcctcccccacctcccagcagttctgctgtcttccgcctggaccaagttatccacagcaaccctgctggcatccaacaggctctggcccagcttagtagccgtcaagggagtgtaactgcaccagggggtcatccaaggcacaagcctgggcctccccaagcccctcagggcccctctcctaggcccccaacccgatacgagccccagagggtcaacagcggcctcagttctgacccccactttgaggagccggggccaatggtgagaggggtgggtgggactcctcgggactctgccggggttagtccctttccccctaaacgtcgggagcggcctcccagaaaaccagagctgctacaggaggaatctttgccacctcctcatagctctggattcttgggctctaagcctgagggcccaggccctcaggcagagtccagagatacaggcacagaggccctgacccctcacatctggaaccgtttacatactgccactagccgaaagagttaccggcccagctccatggagccttggatggagcccctgagtccttttgaggatgtggctggcacagaaatgagtcagtctgacagtggggtggacctgagtggggattctcaggtgtcatcaggtccctgcagccagcgaagttcccctgatggaggactcaagggggcagcagagggaccccccaagaggcctggaggctcctcacccctgaatgctgttccttgtgagggtccacctggctctgaacctcctaggagaccaccacctgccccccacgatggggacagaaaggagctgccccgggagcagcctctgccccctggccccattggcacagaacgatcacagcatacagaccgaggcacagagcctggccccattcggccatcccatcgacctggtcccccagtccagtttggcactagtgacaaggactcagacttacgcctagtggtaggagacagcttgaaagcagagaaggagctaacagcatcagtcactgaggccattcctgtatcacgagactgggagctgcttcccagtgctgctgcctctgctgagccacaatccaagaacctggattctgggcactgtgtcccggagcccagctcctcaggccagcgcctgtatcctgaggttttctatggcagtgctgggccttccagttctcagatctctgggggacatggactctcagttacatccaaacagtggaggcgccctgggacaccctcactgcacccttacagatcacagcccctatacctaccccccggcccagcccctccctcagcactgctctctggggtagctctcaagggccagtttctggatttctccacaatgcaagctacagagctggggaagttgccggctggaggagttctctaccctccaccttccttcctctactctccggctttctgccccagtcctttgcctgacacatcgttgcttcaggtacgccaggatctgccatccccttcggatttttattctactcctctgcagcctggtggccaaagtggctttctcccttcaggggctcctgcccagcagatgcttctacccatggtagactcacagctgcctgtggtgaactttggctccctgccgccagcaccacctcctgccccaccttccctttctctgttacctgtgggccctgctctgcagccccccagcctggctgtgcggcccccacctgctcctgctactcgggtgctgccttcacctgccaggcccttccccgctagcttggggcgagcagagctgcatccagtggaactaaagccgttccaggattatcaaaaactgagcagcaaccttgggggacctggatcatcacggactcccccaactggaaggtccttctctggcctcaattcccgtctcaaggccacgccttccacctacagtggagtcttccgcacccagcgcgtcgacctttaccagcaggcctccccaccagatgccctgcgctggatacctaagccttgggagcggacagggccgccacctcgagaagggccctcccgacgggcagaggagcctgggtcccgaggggacaaggagcctgggttgcccccaccccgctgagggagttcctcttgccccctacccccggggcttgtatatagattataaatatataagggggaaaggggtgggcggggaggggttctggggctggggcctcacttcccctcctcccccttcccctggtcccctgtccctggggctgtttgttaaaaaagagtaataaaaggattt

SEQ ID NO: 344418 - DNA, 6873 bp, Artificial Sequence
  derived and/or modified sequence
agggggtgctcccgggggcggcggttgcccggatgggccgttagtcggggctcagccgcggagtgagcgagggagacgggaggagccgaacccggcgccatccgccgccatcctcccccgccccaccgccatcccgtcccggggagcccctaggcccgggtcccggatccccgcgcacccggccaggctctggcacgttttgggggaggtgcctgcaggacccaacatactcaatgagcttccagcgcaatgtccgatcgctcggggccgactgccaagggaaaggatggaaagaagtattcctcgctcaacctgtttgatacgtataagggcaagtccttagagatccagaaacccgctgttgcccctcgccatggcctgcagagtctcgggaaagttgccattgcccggcgtatgccacctccagccaaccttccaagcctgaaagccgagaacaaaggcaatgaccccaatgtctcactagtgccaaaagacggaacaggatgggcaagcaaacaggagcagtccgaccccaagagttccgatgcctcaaccgctcagccgccggaatcgcagccactgccggcttcacagacgcctgcctccaaccagccgaaacgacccccagcagcccccgagaacactcctttggttccaagcggggtaaagtcctgggcacaagccagcgtcacccatggagcacatggagatggtggaagggcatcaagcctactgtcacgattctctcgagaggaatttccgaccctgcaggcggctggcgaccaggacaaggctgccaaggaaagggagtctgccgaacagtcgtctgggcccggaccaagcctccgcccccaaaattctacaacttggagggacggaggtgggcgtggccctgatgagctggagggcccggactccaaacttcatcatggtcatgatccccggggtgggctacagccttcaggcccaccccagttccctccctaccgcggaatgatgccgcctttcatgtatcccccatatctcccgttccctccgccctatggaccccaggggccttaccgataccccactcctgatgggcccagccgttttccccgtgtggcgggcccccgaggctcagggccaccaatgcgcttagtagagcctgtgggtcgtccctctattctcaaagaggataatctcaaagagtttgatcagttggatcaggagaatgatgatggttgggcaggggcccatgaagaggttgactacactgaaaagctcaagttcagcgatgaggaagatgggcgagactctgatgaggagggagctgagggccacagggattcccaatcagcttctggtgaggaacggccccctgaagcagatggcaaaaagggcaactcccccaacagcgaaccgcccactcctaagacggcctgggcagaaacctctcggcctccagagacagagccgggacctcctgccccaaagcctcccctacccccacctcaccggggccccgccgggaactggggcccccctggggactacccagatcgtgggggtcctccctgcaagcccccagcacctgaagatgaggatgaggcatggcggcagcgacgaaagcagtcgtcatctgagatttccctggcagtggagcgggcccggcgacggcgagaagaagaggagcggcgcatgcaagaagagcgccgggcagcctgtgctgagaagctcaagcgactcgatgaaaagtttggggcacctgacaagcggctcaaagcagagcctgctgccccacctgctgccccttctaccccagctccaccacctgcagtccctaaagaactccctgcacctccagctccacctccagcatcagccccaacaccagagaaagaacctgaagagccagcacaggcccctcctgcccaatctactcctactccaggtgtggctgcggctcccactctggtgagtggtggtggcagtaccagtagcaccagcagtggcagcttcgaagccagcccagtggaaccacaactgccctcaaaagagggtcctgaaccaccagaagaggttcctcctcctaccacacccccagttccaaaggtggaacccaagggtgatgggattggtcccacccgccagccccctagtcagggcttgggctaccccaaatatcagaagtcgttgcctcctcgtttccagcggcagcagcaggagcagctcctgaagcagcagcagcagcaccagtggcagcagcatcaacagggctctgcccctcctaccccagtgcccccatcaccaccacagcctgtgaccctgggggctgtgccagctccacaggctccacccccgccccccaaggccctgtacccaggtgctctgggccggcccccacccatgcccccaatgaactttgatccccgatggatgatgattcctccttatgtggacccccggctcctccagggtcgtccccctctagacttctaccctcctggtgtgcatccctctggcctagttccccgagagcgttcagacagtgggggctcaagctcagagccatttgaccgtcatgcacctgctatgttacgggaacggggcactccaccggtggatccaaagttggcctgggtgggagatgtcttcaccgccacacccgctgaaccccgcccacttacctcacctctgcgccaggctgcggatgaggatgacaaggggatgaggagcgagactcctccagtacctcccccaccaccctatctggccagttatccaggctttcctgagaatggagcccctgggcccccaatctctcgctttcctctggaggaaccagggccccgtccactcccctggcccccaggcagtgatgaagtggccaagatacaaactccaccacccaagaaggagccccctaaggaggagactgcacagctgacggggccagaagcaggccgaaagcctgcccgcggagtcgggagtggaggccagggccccccaccaccacgcagagagagtcgcacagagacccgctggggccctcgtccagggagcagtcgtcgtggaatccctccagaggagccaggggccccaccccgccgggctgggcctataaagaaacctccaccacctacaaaagtagaagagctgcctcccaagcccctcgaacagggggatgaaacccccaaacccccaaagccagacccactcaagataaccaaggggaagctagggggccccaaggagaccccacccaatggaaatctttcccctgccccaaggcttcggagggactattcgtatgaaagagtgggtcctacctcttgccggggtcggggccgaggcgagtattttgccagagggaggggttttcgggggacctatgggggacgagggcggggagccgccgggaattccgcagttaccgagagtttcgaggagatgatgggcgtggaggtgggacagggggaccaaaccaccctcctgctccccgaggccgcactgccagcgagacacggagcgagggttcagagtatgaggaaatccccaagcggcgccggcagcggggctcagaaacaggcagcgagacccatgagagtgatctggctccttcagacaaggaggctcccacacccaaggagggaacactcacccaggtcccgctcccccaccaccaggagccccaccttcccagccccagcccgcttcactcccggggtgggcgagtcttcactcccagaggggatctcgccggggccgaggaggagggagcctcctcaagtttgcccaggctggagccctccagccaagtctctggctcccaagaaacctcccacaggccctttgccaccaagtaaggagcctttgaaagagaagttgatcccagggcctctgtcccctgtggcgcgcggaggcagcaatggaggtagcaatgtgggcatggaagatggggagcgaccccgaaggaggcgacatgggagggctcagcagcaggataaaccgcctcgtttccggaggctgaagcaggaacgggagaatgccgcaagggggtctgagggcaagccctccctaacccttccagcctccgctcctggacctgaggaggccctcacaacagtcacagtggccccagcacctcgccgggcagctgccaagtctcctgatctgtcaaaccagaactcagaccaagccaatgaggaatgggagactgcatcagagagcagtgacttcaccagtgagcgccgaggggacaaagaggcacccccaccagtactgctgacacccaaggctgtgggaactcctgggggaggtggaggtggagccgtaccaggtatttcagccatgtcccgcggagatctgagccagagagccaaggatttgagtaaacggagcttctcaagtcagcggccaggcatggaacggcagaatcggcgccctggcccagggggcaaggctggcagcagtggcagcagcagtggaggaggcggtgggggtcctggaggaaggaccgggccaggacgaggcgacaagaggagctggccctctcccaagaaccgaagtcgtcctccagaggagcgtcccccggggcttcccctgcctcccccacctcccagcagttctgctgtcttccgcctggaccaagttatccacagcaaccctgctggcatccaacaggctctggcccagcttagtagccgtcaagggagtgtaactgcaccagggggtcatccaaggcacaagcctgggcctccccaagcccctcagggcccctctcctaggcccccaacccgatacgagccccagagggtcaacagcggcctcagttctgacccccactttgaggagccggggccaatggtgagaggggtgggtgggactcctcgggactctgccggggttagtccctttccccctaaacgtcgggagcggcctcccagaaaaccagagctgctacaggaggaatctttgccacctcctcatagctctggattcttgggctctaagcctgagggcccaggccctcaggcagagtccagagatacaggcacagaggccctgacccctcacatctggaaccgtttacatactgccactagccgaaagagttaccggcccagctccatggagccttggatggagcccctgagtccttttgaggatgtggctggcacagaaatgagtcagtctgacagtggggtggacctgagtggggattctcaggtgtcatcaggtccctgcagccagcgaagttcccctgatggaggactcaagggggcagcagagggaccccccaagaggcctggaggctcctcacccctgaatgctgttccttgtgagggtccacctggctctgaacctcctaggagaccaccacctgccccccacgatggggacagaaaggagctgccccgggagcagcctctgccccctggccccattggcacagaacgatcacagcatacagaccgaggcacagagcctggccccattcggccatcccatcgacctggtcccccagtccagtttggcactagtgacaaggactcagacttacgcctagtggtaggagacagcttgaaagcagagaaggagctaacagcatcagtcactgaggccattcctgtatcacgagactgggagctgcttcccagtgctgctgcctctgctgagccacaatccaagaacctggattctgggcactgtgtcccggagcccagctcctcaggccagcgcctgtatcctgaggttttctatggcagtgctgggccttccagttctcagatctctgggggacatggactctcagttacatccaaacagtggaggcgccctgggacaccctcactgcacccttacagatcacagcccctatacctaccccccggcccagcccctccctcagcactgctctctggggtagctctcaagggccagtttctggatttctccacaatgcaagctacagagctggggaagttgccggctggaggagttctctaccctccaccttccttcctctactctccggctttctgccccagtcctttgcctgacacatcgttgcttcaggtacgccaggatctgccatccccttcggatttttattctactcctctgcagcctggtggccaaagtggctttctcccttcaggggctcctgcccagcagatgcttctacccatggtagactcacagctgcctgtggtgaactttggctccctgccgccagcaccacctcctgccccaccttccctttctctgttacctgtgggccctgctctgcagccccccagcctggctgtgcggcccccacctgctcctgctactcgggtgctgccttcacctgccaggcccttccccgctagcttggggcgagcagagctgcatccagtggaactaaagccgttccaggattatcaaaaactgagcagcaaccttgggggacctggatcatcacggactcccccaactggaaggtccttctctggcctcaattcccgtctcaaggccacgccttccacctacagtggagtcttccgcacccagcgcgtcgacctttaccagcaggcctccccaccagatgccctgcgctggatacctaagccttgggagcggacagggccgccacctcgagaagggccctcccgacgggcagaggagcctgggtcccgaggggacaaggagcctgggttgcccccaccccgctgagggagttcctcttgccccctacccccggggcttgtatatagattataaatatataagggggaaaggggtgggcggggaggggttctggggctggggcctcacttcccctcctcccccttcccctggtcccctgtccctggggctgtttgttaaaaaagagtaataaaaggattt

SEQ ID NO: 344419 - DNA, 4303 bp, Artificial Sequence
  derived and/or modified sequence
ttcttcaggcctagttccccgagagcgttcagacagtgggggctcaagctcagagccatttgaccgtcatgcacctgctatgttacgggaacggggcactccaccggtggatccaaagttggcctgggtgggagatgtcttcaccgccacacccgctgaaccccgcccacttacctcacctctgcgccaggctgcggatgaggatgacaaggggatgaggagcgagactcctccagtacctcccccaccaccctatctggccagttatccaggctttcctgagaatggagcccctgggcccccaatctctcgctttcctctggaggaaccagggccccgtccactcccctggcccccaggcagtgatgaagtggccaagatacaaactccaccacccaagaaggagccccctaaggaggagactgcacagctgacggggccagaagcaggccgaaagcctgcccgcggagtcgggagtggaggccagggccccccaccaccacgcagagagagtcgcacagagacccgctggggccctcgtccagggagcagtcgtcgtggaatccctccagaggagccaggggccccaccccgccgggctgggcctataaagaaacctccaccacctacaaaagtagaagagctgcctcccaagcccctcgaacagggggatgaaacccccaaacccccaaagccagacccactcaagataaccaaggggaagctagggggccccaaggagaccccacccaatggaaatctttcccctgccccaaggcttcggagggactattcgtatgaaagagtgggtcctacctcttgccggggtcggggccgaggcgagtattttgccagagggaggggttttcgggggacctatgggggacgagggcggggagcccgaagccgggaattccgcagttaccgagagtttcgaggagatgatgggcgtggaggtgggacagggggaccaaaccaccctcctgctccccgaggccgcactgccagcgagacacggagcgagggttcagagtatgaggaaatccccaagcggcgccggcagcggggctcagaaacaggcagcgagacccatgagagtgatctggctccttcagacaaggaggctcccacacccaaggagggaacactcacccaggtccctctcgctcccccaccaccaggagccccaccttcaccagccccagcccgcttcactgcccggggtgggcgagtcttcactcccagaggggtgccatctcgccggggccgaggaggagggaggccccctcctcaagtttgcccaggctggagccctccagccaagtctctggctcccaagaaacctcccacaggccctttgccaccaagtaaggagcctttgaaagagaagttgatcccagggcctctgtcccctgtggcgcgcggaggcagcaatggaggtagcaatgtgggcatggaagatggggagcgaccccgaaggaggcgacatgggagggctcagcagcaggataaaccgcctcgtttccggaggctgaagcaggaacgggagaatgccgcaagggggtctgagggcaagccctccctaacccttccagcctccgctcctggacctgaggaggccctcacaacagtcacagtggccccagcacctcgccgggcagctgccaagtctcctgatctgtcaaaccagaactcagaccaagccaatgaggaatgggagactgcatcagagagcagtgacttcaccagtgagcgccgaggggacaaagaggcacccccaccagtactgctgacacccaaggctgtgggaactcctgggggaggtggaggtggagccgtaccaggtatttcagccatgtcccgcggagatctgagccagagagccaaggatttgagtaaacggagcttctcaagtcagcggccaggcatggaacggcagaatcggcgccctggcccagggggcaaggctggcagcagtggcagcagcagtggaggaggcggtgggggtcctggaggaaggaccgggccaggacgaggcgacaagaggagctggccctctcccaagaaccgaagtcgtcctccagaggagcgtcccccggggcttcccctgcctcccccacctcccagcagttctgctgtcttccgcctggaccaagttatccacagcaaccctgctggcatccaacaggctctggcccagcttagtagccgtcaagggagtgtaactgcaccagggggtcatccaaggcacaagcctgggcctccccaagcccctcagggcccctctcctaggcccccaacccgatacgagccccagagggtcaacagcggcctcagttctgacccccactttgaggagccggggccaatggtgagaggggtgggtgggactcctcgggactctgccggggttagtccctttccccctaaacgtcgggagcggcctcccagaaaaccagagctgctacaggaggaatctttgccacctcctcatagctctggattcttgggctctaagcctgagggcccaggccctcaggcagagtccagagatacaggcacagaggccctgacccctcacatctggaaccgtttacatactgccactagccgaaagagttaccggcccagctccatggagccttggatggagcccctgagtccttttgaggatgtggctggcacagaaatgagtcagtctgacagtggggtggacctgagtggggattctcaggtgtcatcaggtccctgcagccagcgaagttcccctgatggaggactcaagggggcagcagagggaccccccaagaggcctggaggctcctcacccctgaatgctgttccttgtgagggtccacctggctctgaacctcctaggagaccaccacctgccccccacgatggggacagaaaggagctgccccgggagcagcctctgccccctggccccattggcacagaacgatcacagcatacagaccgaggcacagagcctggccccattcggccatcccatcgacctggtcccccagtccagtttggcactagtgacaaggactcagacttacgcctagtggtaggagacagcttgaaagcagagaaggagctaacagcatcagtcactgaggccattcctgtatcacgagactgggagctgcttcccagtgctgctgcctctgctgagccacaatccaagaacctggattctgggcactgtgtcccggagcccagctcctcaggccagcgcctgtatcctgaggttttctatggcagtgctgggccttccagttctcagatctctgggggagccatggactctcagttacatccaaacagtggaggcttccgccctgggacaccctcactgcacccttacagatcacagcccctatacctaccccccggcccagcccctccctcagcactgctctctggggtagctctcaagggccagtttctggatttctccacaatgcaagctacagagctggggaagttgccggctggaggagttctctaccctccaccttccttcctctactctccggctttctgccccagtcctttgcctgacacatcgttgcttcaggtacgccaggatctgccatccccttcggatttttattctactcctctgcagcctggtggccaaagtggctttctcccttcaggggctcctgcccagcagatgcttctacccatggtagactcacagctgcctgtggtgaactttggctccctgccgccagcaccacctcctgccccaccttccctttctctgttacctgtgggccctgctctgcagccccccagcctggctgtgcggcccccacctgctcctgctactcgggtgctgccttcacctgccaggcccttccccgctagcttggggcgagcagagctgcatccagtggaactaaagccgttccaggattatcaaaaactgagcagcaaccttgggggacctggatcatcacggactcccccaactggaaggtccttctctggcctcaattcccgtctcaaggccacgccttccacctacagtggagtcttccgcacccagcgcgtcgacctttaccagcaggcctccccaccagatgccctgcgctggatacctaagccttgggagcggacagggccgccacctcgagaagggccctcccgacgggcagaggagcctgggtcccgaggggacaaggagcctgggttgcccccaccccgctgagggagttcctcctcccccttcccctggtcccctgtccctggggctgtttgttaaaaaagagtaataaaaggattt

SEQ ID NO: 344420 - DNA, 6840 bp, Artificial Sequence
  derived and/or modified sequence
agggggtgctcccgggggcggcggttgcccggatgggccgttagtcggggctcagccgcggagtgagcgagggagacgggaggagccgaacccggcgccatccgccgccatcctcccccgccccaccgccatcccgtcccggggagcccctaggcccgggtcccggatccccgcgcacccggccaggctctggcacgttttgggggaggtgcctgcaggacccaacatactcaatgagcttccagcgcaatgtccgatcgctcggggccgactgccaagggaaaggatggaaagaagtattcctcgctcaacctgtttgatacgtataagggcaagtccttagagatccagaaacccgctgttgcccctcgccatggcctgcagagtctcgggaaagttgccattgcccggcgtatgccacctccagccaaccttccaagcctgaaagccgagaacaaaggcaatgaccccaatgtctcactagtgccaaaagacggaacaggatgggcaagcaaacaggagcagtccgaccccaagagttccgatgcctcaaccgctcagccgccggaatcgcagccactgccggcttcacagacgcctgcctccaaccagccgaaacgacccccagcagcccccgagaacactcctttggttccaagcggggtaaagtcctgggcacaagccagcgtcacccatggagcacatggagatggtggaagggcatcaagcctactgtcacgattctctcgagaggaatttccgaccctgcaggcggctggcgaccaggacaaggctgccaaggaaagggagtctgccgaacagtcgtctgggcccggaccaagcctccgcccccaaaattctacaacttggagggacggaggtgggcgtggccctgatgagctggagggcccggactccaaacttcatcatggtcatgatccccggggtgggctacagccttcaggcccaccccagttccctccctaccgcggaatgatgccgcctttcatgtatcccccatatctcccgttccctccgccctatggaccccaggggccttaccgataccccactcctgatgggcccagccgttttccccgtgtggcgggcccccgaggctcagggccaccaatgcgcttagtagagcctgtgggtcgtccctctattctcaaagaggataatctcaaagagtttgatcagttggatcaggagaatgatgatggttgggcaggggcccatgaagaggttgactacactgaaaagctcaagttcagcgatgaggaagatgggcgagactctgatgaggagggagctgagggccacagggattcccaatcagcttctggtgaggaacggccccctgaagcagatggcaaaaagggcaactcccccaacagcgaaccgcccactcctaagacggcctgggcagaaacctctcggcctccagagacagagccgggacctcctgccccaaagcctcccctacccccccctggggactacccagatcgtgggggtcctccctgcaagcccccagcacctgaagatgaggatgaggcatggcggcagcgacgaaagcagtcgtcatctgagatttccctggcagtggagcgggcccggcgacggcgagaagaagaggagcggcgcatgcaagaagagcgccgggcagcctgtgctgagaagctcaagcgactcgatgaaaagtttggggcacctgacaagcggctcaaagcagagcctgctgccccacctgctgccccttctaccccagctccaccacctgcagtccctaaagaactccctgcacctccagctccacctccagcatcagccccaacaccagagaaagaacctgaagagccagcacaggcccctcctgcccaatctactcctactccaggtgtggctgcggctcccactctggtgagtggtggtggcagtaccagtagcaccagcagtggcagcttcgaagccagcccagtggaaccacaactgccctcaaaagagggtcctgaaccaccagaagaggttcctcctcctaccacacccccagttccaaaggtggaacccaagggtgatgggattggtcccacccgccagccccctagtcagggcttgggctaccccaaatatcagaagtcgttgcctcctcgtttccagcggcagcagcaggagcagctcctgaagcagcagcagcagcaccagtggcagcagcatcaacagggctctgcccctcctaccccagtgcccccatcaccaccacagcctgtgaccctgggggctgtgccagctccacaggctccacccccgccccccaaggccctgtacccaggtgctctgggccggcccccacccatgcccccaatgaactttgatccccgatggatgatgattcctccttatgtggacccccggctcctccagggtcgtccccctctagacttctaccctcctggtgtgcatccctctggcctagttccccgagagcgttcagacagtgggggctcaagctcagagccatttgaccgtcatgcacctgctatgttacgggaacggggcactccaccggtggatccaaagttggcctgggtgggagatgtcttcaccgccacacccgctgaaccccgcccacttacctcacctctgcgccaggctgcggatgaggatgacaaggggatgaggagcgagactcctccagtacctcccccaccaccctatctggccagttatccaggctttcctgagaatggagcccctgggcccccaatctctcgctttcctctggaggaaccagggccccgtccactcccctggcccccaggcagtgatgaagtggccaagatacaaactccaccacccaagaaggagccccctaaggaggagactgcacagctgacggggccagaagcaggccgaaagcctgcccgcggagtcgggagtggaggccagggccccccaccaccacgcagagagagtcgcacagagacccgctggggccctcgtccagggagcagtcgtcgtggaatccctccagaggagccaggggccccaccccgccgggctgggcctataaagaaacctccaccacctacaaaagtagaagagctgcctcccaagcccctcgaacagggggatgaaacccccaaacccccaaagccagacccactcaagataaccaaggggaagctagggggccccaaggagaccccacccaatggaaatctttcccctgccccaaggcttcggagggactattcgtatgaaagagtgggtcctacctcttgccggggtcggggccgaggcgagtattttgccagagggaggggttttcgggggacctatgggggacgagggcggggagccgccgggaattccgcagttaccgagagtttcgaggagatgatgggcgtggaggtgggacagggggaccaaaccaccctcctgctccccgaggccgcactgccagcgagacacggagcgagggttcagagtatgaggaaatccccaagcggcgccggcagcggggctcagaaacaggcagcgagacccatgagagtgatctggctccttcagacaaggaggctcccacacccaaggagggaacactcacccaggtcccgctcccccaccaccaggagccccaccttcccagccccagcccgcttcactcccggggtgggcgagtcttcactcccagaggggatctcgccggggccgaggaggagggagcctcctcaagtttgcccaggctggagccctccagccaagtctctggctcccaagaaacctcccacaggccctttgccaccaagtaaggagcctttgaaagagaagttgatcccagggcctctgtcccctgtggcgcgcggaggcagcaatggaggtagcaatgtgggcatggaagatggggagcgaccccgaaggaggcgacatgggagggctcagcagcaggataaaccgcctcgtttccggaggctgaagcaggaacgggagaatgccgcaagggggtctgagggcaagccctccctaacccttccagcctccgctcctggacctgaggaggccctcacaacagtcacagtggccccagcacctcgccgggcagctgccaagtctcctgatctgtcaaaccagaactcagaccaagccaatgaggaatgggagactgcatcagagagcagtgacttcaccagtgagcgccgaggggacaaagaggcacccccaccagtactgctgacacccaaggctgtgggaactcctgggggaggtggaggtggagccgtaccaggtatttcagccatgtcccgcggagatctgagccagagagccaaggatttgagtaaacggagcttctcaagtcagcggccaggcatggaacggcagaatcggcgccctggcccagggggcaaggctggcagcagtggcagcagcagtggaggaggcggtgggggtcctggaggaaggaccgggccaggacgaggcgacaagaggagctggccctctcccaagaaccgaagtcgtcctccagaggagcgtcccccggggcttcccctgcctcccccacctcccagcagttctgctgtcttccgcctggaccaagttatccacagcaaccctgctggcatccaacaggctctggcccagcttagtagccgtcaagggagtgtaactgcaccagggggtcatccaaggcacaagcctgggcctccccaagcccctcagggcccctctcctaggcccccaacccgatacgagccccagagggtcaacagcggcctcagttctgacccccactttgaggagccggggccaatggtgagaggggtgggtgggactcctcgggactctgccggggttagtccctttccccctaaacgtcgggagcggcctcccagaaaaccagagctgctacaggaggaatctttgccacctcctcatagctctggattcttgggctctaagcctgagggcccaggccctcaggcagagtccagagatacaggcacagaggccctgacccctcacatctggaaccgtttacatactgccactagccgaaagagttaccggcccagctccatggagccttggatggagcccctgagtccttttgaggatgtggctggcacagaaatgagtcagtctgacagtggggtggacctgagtggggattctcaggtgtcatcaggtccctgcagccagcgaagttcccctgatggaggactcaagggggcagcagagggaccccccaagaggcctggaggctcctcacccctgaatgctgttccttgtgagggtccacctggctctgaacctcctaggagaccaccacctgccccccacgatggggacagaaaggagctgccccgggagcagcctctgccccctggccccattggcacagaacgatcacagcatacagaccgaggcacagagcctggccccattcggccatcccatcgacctggtcccccagtccagtttggcactagtgacaaggactcagacttacgcctagtggtaggagacagcttgaaagcagagaaggagctaacagcatcagtcactgaggccattcctgtatcacgagactgggagctgcttcccagtgctgctgcctctgctgagccacaatccaagaacctggattctgggcactgtgtcccggagcccagctcctcaggccagcgcctgtatcctgaggttttctatggcagtgctgggccttccagttctcagatctctgggggacatggactctcagttacatccaaacagtggaggcgccctgggacaccctcactgcacccttacagatcacagcccctatacctaccccccggcccagcccctccctcagcactgctctctggggtagctctcaagggccagtttctggatttctccacaatgcaagctacagagctggggaagttgccggctggaggagttctctaccctccaccttccttcctctactctccggctttctgccccagtcctttgcctgacacatcgttgcttcaggtacgccaggatctgccatccccttcggatttttattctactcctctgcagcctggtggccaaagtggctttctcccttcaggggctcctgcccagcagatgcttctacccatggtagactcacagctgcctgtggtgaactttggctccctgccgccagcaccacctcctgccccaccttccctttctctgttacctgtgggccctgctctgcagccccccagcctggctgtgcggcccccacctgctcctgctactcgggtgctgccttcacctgccaggcccttccccgctagcttggggcgagcagagctgcatccagtggaactaaagccgttccaggattatcaaaaactgagcagcaaccttgggggacctggatcatcacggactcccccaactggaaggtccttctctggcctcaattcccgtctcaaggccacgccttccacctacagtggagtcttccgcacccagcgcgtcgacctttaccagcaggcctccccaccagatgccctgcgctggatacctaagccttgggagcggacagggccgccacctcgagaagggccctcccgacgggcagaggagcctgggtcccgaggggacaaggagcctgggttgcccccaccccgctgagggagttcctcttgccccctacccccggggcttgtatatagattataaatatataagggggaaaggggtgggcggggaggggttgtggggctggggcctcacttcccctcctcccccttcccctggtcccctgtccctggggctgtttgttaaaaaagagtaataaaaggattt

SEQ ID NO: 344421 - DNA, 6873 bp, Artificial Sequence
  derived and/or modified sequence
agggggtgctcccgggggcggcggttgcccggatgggccgttagtcggggctcagccgcggagtgagcgagggagacgggaggagccgaacccggcgccatccgccgccatcctcccccgccccaccgccatcccgtcccggggagcccctaggcccgggtcccggatccccgcgcacccggccaggctctggcacgttttgggggaggtgcctgcaggacccaacatactcaatgagcttccagcgcaatgtccgatcgctcggggccgactgccaagggaaaggatggaaagaagtattcctcgctcaacctgtttgatacgtataagggcaagtccttagagatccagaaacccgctgttgcccctcgccatggcctgcagagtctcgggaaagttgccattgcccggcgtatgccacctccagccaaccttccaagcctgaaagccgagaacaaaggcaatgaccccaatgtctcactagtgccaaaagacggaacaggatgggcaagcaaacaggagcagtccgaccccaagagttccgatgcctcaaccgctcagccgccggaatcgcagccactgccggcttcacagacgcctgcctccaaccagccgaaacgacccccagcagcccccgagaacactcctttggttccaagcggggtaaagtcctgggcacaagccagcgtcacccatggagcacatggagatggtggaagggcatcaagcctactgtcacgattctctcgagaggaatttccgaccctgcaggcggctggcgaccaggacaaggctgccaaggaaagggagtctgccgaacagtcgtctgggcccggaccaagcctccgcccccaaaattctacaacttggagggacggaggtgggcgtggccctgatgagctggagggcccggactccaaacttcatcatggtcatgatccccggggtgggctacagccttcaggcccaccccagttccctccctaccgcggaatgatgccgcctttcatgtatcccccatatctcccgttccctccgccctatggaccccaggggccttaccgataccccactcctgatgggcccagccgttttccccgtgtggcgggcccccgaggctcagggccaccaatgcgcttagtagagcctgtgggtcgtccctctattctcaaagaggataatctcaaagagtttgatcagttggatcaggagaatgatgatggttgggcaggggcccatgaagaggttgactacactgaaaagctcaagttcagcgatgaggaagatgggcgagactctgatgaggagggagctgagggccacagggattcccaatcagcttctggtgaggaacggccccctgaagcagatggcaaaaagggcaactcccccaacagcgaaccgcccactcctaagacggcctgggcagaaacctctcggcctccagagacagagccgggacctcctgccccaaagcctcccctacccccacctcaccggggccccgccgggaactggggcccccctggggactacccagatcgtgggggtcctccctgcaagcccccagcacctgaagatgaggatgaggcatggcggcagcgacgaaagcagtcgtcatctgagatttccctggcagtggagcgggcccggcgacggcgagaagaagaggagcggcgcatgcaagaagagcgccgggcagcctgtgctgagaagctcaagcgactcgatgaaaagtttggggcacctgacaagcggctcaaagcagagcctgctgccccacctgctgccccttctaccccagctccaccacctgcagtccctaaagaactccctgcacctccagctccacctccagcatcagccccaacaccagagaaagaacctgaagagccagcacaggcccctcctgcccaatctactcctactccaggtgtggctgcggctcccactctggtgagtggtggtggcagtaccagtagcaccagcagtggcagcttcgaagccagcccagtggaaccacaactgccctcaaaagagggtcctgaaccaccagaagaggttcctcctcctaccacacccccagttccaaaggtggaacccaagggtgatgggattggtcccacccgccagccccctagtcagggcttgggctaccccaaatatcagaagtcgttgcctcctcgtttccagcggcagcagcaggagcagctcctgaagcagcagcagcagcaccagtggcagcagcatcaacagggctctgcccctcctaccccagtgcccccatcaccaccacagcctgtgaccctgggggctgtgccagctccacaggctccacccccgccccccaaggccctgtacccaggtgctctgggccggcccccacccatgcccccaatgaactttgatccccgatggatgatgattcctccttatgtggacccccggctcctccagggtcgtccccctctagacttctaccctcctggtgtgcatccctctggcctagttccccgagagcgttcagacagtgggggctcaagctcagagccatttgaccgtcatgcacctgctatgttacgggaacggggcactccaccggtggatccaaagttggcctgggtgggagatgtcttcaccgccacacccgctgaaccccgcccacttacctcacctctgcgccaggctgcggatgaggatgacaaggggatgaggagcgagactcctccagtacctcccccaccaccctatctggccagttatccaggctttcctgagaatggagcccctgggcccccaatctctcgctttcctctggaggaaccagggccccgtccactcccctggcccccaggcagtgatgaagtggccaagatacaaactccaccacccaagaaggagccccctaaggaggagactgcacagctgacggggccagaagcaggccgaaagcctgcccgcggagtcgggagtggaggccagggccccccaccaccacgcagagagagtcgcacagagacccgctggggccctcgtccagggagcagtcgtcgtggaatccctccagaggagccaggggccccaccccgccgggctgggcctataaagaaacctccaccacctacaaaagtagaagagctgcctcccaagcccctcgaacagggggatgaaacccccaaacccccaaagccagacccactcaagataaccaaggggaagctagggggccccaaggagaccccacccaatggaaatctttcccctgccccaaggcttcggagggactattcgtatgaaagagtgggtcctacctcttgccggggtcggggccgaggcgagtattttgccagagggaggggttttcgggggacctatgggggacgagggcggggagccgccgggaattccgcagttaccgagagtttcgaggagatgatgggcgtggaggtgggacagggggaccaaaccaccctcctgctccccgaggccgcactgccagcgagacacggagcgagggttcagagtatgaggaaatccccaagcggcgccggcagcggggctcagaaacaggcagcgagacccatgagagtgatctggctccttcagacaaggaggctcccacacccaaggagggaacactcacccaggtcccgctcccccaccaccaggagccccaccttcccagccccagcccgcttcactcccggggtgggcgagtcttcactcccagaggggatctcgccggggccgaggaggagggagcctcctcaagtttgcccaggctggagccctccagccaagtctctggctcccaagaaacctcccacaggccctttgccaccaagtaaggagcctttgaaagagaagttgatcccagggcctctgtcccctgtggcgcgcggaggcagcaatggaggtagcaatgtgggcatggaagatggggagcgaccccgaaggaggcgacatgggagggctcagcagcaggataaaccgcctcgtttccggaggctgaagcaggaacgggagaatgccgcaagggggtctgagggcaagccctccctaacccttccagcctccgctcctggacctgaggaggccctcacaacagtcacagtggccccagcacctcgccgggcagctgccaagtctcctgatctgtcaaaccagaactcagaccaagccaatgaggaatgggagactgcatcagagagcagtgacttcaccagtgagcgccgaggggacaaagaggcacccccaccagtactgctgacacccaaggctgtgggaactcctgggggaggtggaggtggagccgtaccaggtatttcagccatgtcccgcggagatctgagccagagagccaaggatttgagtaaacggagcttctcaagtcagcggccaggcatggaacggcagaatcggcgccctggcccagggggcaaggctggcagcagtggcagcagcagtggaggaggcggtgggggtcctggaggaaggaccgggccaggacgaggcgacaagaggagctggccctctcccaagaaccgaagtcgtcctccagaggagcgtcccccggggcttcccctgcctcccccacctcccagcagttctgctgtcttccgcctggaccaagttatccacagcaaccctgctggcatccaacaggctctggcccagcttagtagccgtcaagggagtgtaactgcaccagggggtcatccaaggcacaagcctgggcctccccaagcccctcagggcccctctcctaggcccccaacccgatacgagccccagagggtcaacagcggcctcagttctgacccccactttgaggagccggggccaatggtgagaggggtgggtgggactcctcgggactctgccggggttagtccctttccccctaaacgtcgggagcggcctcccagaaaaccagagctgctacaggaggaatctttgccacctcctcatagctctggattcttgggctctaagcctgagggcccaggccctcaggcagagtccagagatacaggcacagaggccctgacccctcacatctggaaccgtttacatactgccactagccgaaagagttaccggcccagctccatggagccttggatggagcccctgagtccttttgaggatgtggctggcacagaaatgagtcagtctgacagtggggtggacctgagtggggattctcaggtgtcatcaggtccctgcagccagcgaagttcccctgatggaggactcaagggggcagcagagggaccccccaagaggcctggaggctcctcacccctgaatgctgttccttgtgagggtccacctggctctgaacctcctaggagaccaccacctgccccccacgatggggacagaaaggagctgccccgggagcagcctctgccccctggccccattggcacagaacgatcacagcatacagaccgaggcacagagcctggccccattcggccatcccatcgacctggtcccccagtccagtttggcactagtgacaaggactcagacttacgcctagtggtaggagacagcttgaaagcagagaaggagctaacagcatcagtcactgaggccattcctgtatcacgagactgggagctgcttcccagtgctgctgcctctgctgagccacaatccaagaacctggattctgggcactgtgtcccggagcccagctcctcaggccagcgcctgtatcctgaggttttctatggcagtgctgggccttccagttctcagatctctgggggacatggactctcagttacatccaaacagtggaggcgccctgggacaccctcactgcacccttacagatcacagcccctatacctaccccccggcccagcccctccctcagcactgctctctggggtagctctcaagggccagtttctggatttctccacaatgcaagctacagagctggggaagttgccggctggaggagttctctaccctccaccttccttcctctactctccggctttctgccccagtcctttgcctgacacatcgttgcttcaggtacgccaggatctgccatccccttcggatttttattctactcctctgcagcctggtggccaaagtggctttctcccttcaggggctcctgcccagcagatgcttctacccatggtagactcacagctgcctgtggtgaactttggctccctgccgccagcaccacctcctgccccaccttccctttctctgttacctgtgggccctgctctgcagccccccagcctggctgtgcggcccccacctgctcctgctactcgggtgctgccttcacctgccaggcccttccccgctagcttggggcgagcagagctgcatccagtggaactaaagccgttccaggattatcaaaaactgagcagcaaccttgggggacctggatcatcacggactcccccaactggaaggtccttctctggcctcaattcccgtctcaaggccacgccttccacctacagtggagtcttccgcacccagcgcgtcgacctttaccagcaggcctccccaccagatgccctgcgctggatacctaagccttgggagcggacagggccgccacctcgagaagggccctcccgacgggcagaggagcctgggtcccgaggggacaaggagcctgggttgcccccaccccgctgagggagttcctcttgccccctacccccggggcttgtatatagattataaatatataagggggaaaggggtgggcggggaggggttgtggggctggggcctcacttcccctcctcccccttcccctggtcccctgtccctggggctgtttgttaaaaaagagtaataaaaggattt

SEQ ID NO: 344422 - DNA, 6474 bp, Artificial Sequence
  derived and/or modified sequence
atgagcgacagaagcggccccaccgccaagggcaaggacggcaagaagtacagcagcctgaacctgttcgacacctacaagggcaagagcctggagatccagaagcccgccgtggcccccagacacggcctgcagagcctgggcaaggtggccatcgccagaagaatgcccccccccgccaacctgcccagcctgaaggccgagaacaagggcaacgaccccaacgtgagcctggtgcccaaggacggcaccggctgggccagcaagcaggagcagagcgaccccaagagcagcgacgccagcaccgcccagccccccgagagccagcccctgcccgccagccagacccccgccagcaaccagcccaagagaccccccgccgcccccgagaacacccccctggtgcccagcggcgtgaagagctgggcccaggccagcgtgacccacggcgcccacggcgacggcggcagagccagcagcctgctgagcagattcagcagagaggagttccccaccctgcaggccgccggcgaccaggacaaggccgccaaggagagagagagcgccgagcagagcagcggccccggccccagcctgagaccccagaacagcaccacctggagagacggcggcggcagaggccccgacgagctggagggccccgacagcaagctgcaccacggccacgaccccagaggcggcctgcagcccagcggccccccccagttccccccctacagaggcatgatgccccccttcatgtaccccccctacctgcccttcccccccccctacggcccccagggcccctacagataccccacccccgacggccccagcagattccccagagtggccggccccagaggcagcggcccccccatgagactggtggagcccgtgggcagacccagcatcctgaaggaggacaacctgaaggagttcgaccagctggaccaggagaacgacgacggctgggccggcgcccacgaggaggtggactacaccgagaagctgaagttcagcgacgaggaggacggcagagacagcgacgaggagggcgccgagggccacagagacagccagagcgccagcggcgaggagagaccccccgaggccgacggcaagaagggcaacagccccaacagcgagccccccacccccaagaccgcctgggccgagaccagcagaccccccgagaccgagcccggcccccccgcccccaagccccccctgccccccccccacagaggccccgccggcaactggggcccccccggcgactaccccgacagaggcggccccccctgcaagccccccgcccccgaggacgaggacgaggcctggagacagagaagaaagcagagcagcagcgagatcagcctggccgtggagagagccagaagaagaagagaggaggaggagagaagaatgcaggaggagagaagagccgcctgcgccgagaagctgaagagactggacgagaagttcggcgcccccgacaagagactgaaggccgagcccgccgccccccccgccgcccccagcacccccgcccccccccccgccgtgcccaaggagctgcccgccccccccgcccccccccccgccagcgcccccacccccgagaaggagcccgaggagcccgcccaggccccccccgcccagagcacccccacccccggcgtggccgccgcccccaccctggtgagcggcggcggcagcaccagcagcaccagcagcggcagcttcgaggccagccccgtggagccccagctgcccagcaaggagggccccgagccccccgaggaggtgcccccccccaccaccccccccgtgcccaaggtggagcccaagggcgacggcatcggccccaccagacagccccccagccagggcctgggctaccccaagtaccagaagagcctgccccccagattccagagacagcagcaggagcagctgctgaagcagcagcagcagcaccagtggcagcagcaccagcagggcagcgccccccccacccccgtgccccccagccccccccagcccgtgaccctgggcgccgtgcccgccccccaggcccccccccccccccccaaggccctgtaccccggcgccctgggcagacccccccccatgccccccatgaacttcgaccccagatggatgatgatccccccctacgtggaccccagactgctgcagggcagaccccccctggacttctacccccccggcgtgcaccccagcggcctggtgcccagagagagaagcgacagcggcggcagcagcagcgagcccttcgacagacacgcccccgccatgctgagagagagaggcaccccccccgtggaccccaagctggcctgggtgggcgacgtgttcaccgccacccccgccgagcccagacccctgaccagccccctgagacaggccgccgacgaggacgacaagggcatgagaagcgagaccccccccgtgccccccccccccccctacctggccagctaccccggcttccccgagaacggcgcccccggcccccccatcagcagattccccctggaggagcccggccccagacccctgccctggccccccggcagcgacgaggtggccaagatccagacccccccccccaagaaggagccccccaaggaggagaccgcccagctgaccggccccgaggccggcagaaagcccgccagaggcgtgggcagcggcggccagggcccccccccccccagaagagagagcagaaccgagaccagatggggccccagacccggcagcagcagaagaggcatcccccccgaggagcccggcgccccccccagaagagccggccccatcaagaagccccccccccccaccaaggtggaggagctgccccccaagcccctggagcagggcgacgagacccccaagccccccaagcccgaccccctgaagatcaccaagggcaagctgggcggccccaaggagaccccccccaacggcaacctgagccccgcccccagactgagaagagactacagctacgagagagtgggccccaccagctgcagaggcagaggcagaggcgagtacttcgccagaggcagaggcttcagaggcacctacggcggcagaggcagaggcgccagaagcagagagttcagaagctacagagagttcagaggcgacgacggcagaggcggcggcaccggcggccccaaccacccccccgcccccagaggcagaaccgccagcgagaccagaagcgagggcagcgagtacgaggagatccccaagagaagaagacagagaggcagcgagaccggcagcgagacccacgagagcgacctggcccccagcgacaaggaggcccccacccccaaggagggcaccctgacccaggtgcccctggccccccccccccccggcgccccccccagccccgcccccgccagattcaccgccagaggcggcagagtgttcacccccagaggcgtgcccagcagaagaggcagaggcggcggcagaccccccccccaggtgtgccccggctggagcccccccgccaagagcctggcccccaagaagccccccaccggccccctgccccccagcaaggagcccctgaaggagaagctgatccccggccccctgagccccgtggccagaggcggcagcaacggcggcagcaacgtgggcatggaggacggcgagagacccagaagaagaagacacggcagagcccagcagcaggacaagccccccagattcagaagactgaagcaggagagagagaacgccgccagaggcagcgagggcaagcccagcctgaccctgcccgccagcgcccccggccccgaggaggccctgaccaccgtgaccgtggcccccgcccccagaagagccgccgccaagagccccgacctgagcaaccagaacagcgaccaggccaacgaggagtgggagaccgccagcgagagcagcgacttcaccagcgagagaagaggcgacaaggaggcccccccccccgtgctgctgacccccaaggccgtgggcacccccggcggcggcggcggcggcgccgtgcccggcatcagcgccatgagcagaggcgacctgagccagagagccaaggacctgagcaagagaagcttcagcagccagagacccggcatggagagacagaacagaagacccggccccggcggcaaggccggcagcagcggcagcagcagcggcggcggcggcggcggccccggcggcagaaccggccccggcagaggcgacaagagaagctggcccagccccaagaacagaagcagaccccccgaggagagaccccccggcctgcccctgcccccccccccccccagcagcagcgccgtgttcagactggaccaggtgatccacagcaaccccgccggcatccagcaggccctggcccagctgagcagcagacagggcagcgtgaccgcccccggcggccaccccagacacaagcccggccccccccaggccccccagggccccagccccagaccccccaccagatacgagccccagagagtgaacagcggcctgagcagcgacccccacttcgaggagcccggccccatggtgagaggcgtgggcggcacccccagagacagcgccggcgtgagccccttcccccccaagagaagagagagaccccccagaaagcccgagctgctgcaggaggagagcctgccccccccccacagcagcggcttcctgggcagcaagcccgagggccccggcccccaggccgagagcagagacaccggcaccgaggccctgaccccccacatctggaacagactgcacaccgccaccagcagaaagagctacagacccagcagcatggagccctggatggagcccctgagccccttcgaggacgtggccggcaccgagatgagccagagcgacagcggcgtggacctgagcggcgacagccaggtgagcagcggcccctgcagccagagaagcagccccgacggcggcctgaagggcgccgccgagggcccccccaagagacccggcggcagcagccccctgaacgccgtgccctgcgagggcccccccggcagcgagccccccagaagacccccccccgccccccacgacggcgacagaaaggagctgcccagagagcagcccctgccccccggccccatcggcaccgagagaagccagcacaccgacagaggcaccgagcccggccccatcagacccagccacagacccggcccccccgtgcagttcggcaccagcgacaaggacagcgacctgagactggtggtgggcgacagcctgaaggccgagaaggagctgaccgccagcgtgaccgaggccatccccgtgagcagagactgggagctgctgcccagcgccgccgccagcgccgagccccagagcaagaacctggacagcggccactgcgtgcccgagcccagcagcagcggccagagactgtaccccgaggtgttctacggcagcgccggccccagcagcagccagatcagcggcggcgccatggacagccagctgcaccccaacagcggcggcttcagacccggcacccccagcctgcacccctacagaagccagcccctgtacctgccccccggccccgccccccccagcgccctgctgagcggcgtggccctgaagggccagttcctggacttcagcaccatgcaggccaccgagctgggcaagctgcccgccggcggcgtgctgtaccccccccccagcttcctgtacagccccgccttctgccccagccccctgcccgacaccagcctgctgcaggtgagacaggacctgcccagccccagcgacttctacagcacccccctgcagcccggcggccagagcggcttcctgcccagcggcgcccccgcccagcagatgctgctgcccatggtggacagccagctgcccgtggtgaacttcggcagcctgccccccgcccccccccccgccccccccagcctgagcctgctgcccgtgggccccgccctgcagccccccagcctggccgtgagacccccccccgcccccgccaccagagtgctgcccagccccgccagacccttccccgccagcctgggcagagccgagctgcaccccgtggagctgaagcccttccaggactaccagaagctgagcagcaacctgggcggccccggcagcagcagaaccccccccaccggcagaagcttcagcggcctgaacagcagactgaaggccacccccagcacctacagcggcgtgttcagaacccagagagtggacctgtaccagcaggccagcccccccgacgccctgagatggatccccaagccctgggagagaaccggccccccccccagagagggccccagcagaagagccgaggagcccggcagcagaggcgacaaggagcccggcctgcccccccccagatag

SEQ ID NO: 344423 - DNA, 6417 bp, Artificial Sequence
  derived and/or modified sequence
atgagcgacagaagcggccccaccgccaagggcaaggacggcaagaagtacagcagcctgaacctgttcgacacctacaagggcaagagcctggagatccagaagcccgccgtggcccccagacacggcctgcagagcctgggcaaggtggccatcgccagaagaatgcccccccccgccaacctgcccagcctgaaggccgagaacaagggcaacgaccccaacgtgagcctggtgcccaaggacggcaccggctgggccagcaagcaggagcagagcgaccccaagagcagcgacgccagcaccgcccagccccccgagagccagcccctgcccgccagccagacccccgccagcaaccagcccaagagaccccccgccgcccccgagaacacccccctggtgcccagcggcgtgaagagctgggcccaggccagcgtgacccacggcgcccacggcgacggcggcagagccagcagcctgctgagcagattcagcagagaggagttccccaccctgcaggccgccggcgaccaggacaaggccgccaaggagagagagagcgccgagcagagcagcggccccggccccagcctgagaccccagaacagcaccacctggagagacggcggcggcagaggccccgacgagctggagggccccgacagcaagctgcaccacggccacgaccccagaggcggcctgcagcccagcggccccccccagttccccccctacagaggcatgatgccccccttcatgtaccccccctacctgcccttcccccccccctacggcccccagggcccctacagataccccacccccgacggccccagcagattccccagagtggccggccccagaggcagcggcccccccatgagactggtggagcccgtgggcagacccagcatcctgaaggaggacaacctgaaggagttcgaccagctggaccaggagaacgacgacggctgggccggcgcccacgaggaggtggactacaccgagaagctgaagttcagcgacgaggaggacggcagagacagcgacgaggagggcgccgagggccacagagacagccagagcgccagcggcgaggagagaccccccgaggccgacggcaagaagggcaacagccccaacagcgagccccccacccccaagaccgcctgggccgagaccagcagaccccccgagaccgagcccggcccccccgcccccaagccccccctgcccccccccggcgactaccccgacagaggcggccccccctgcaagccccccgcccccgaggacgaggacgaggcctggagacagagaagaaagcagagcagcagcgagatcagcctggccgtggagagagccagaagaagaagagaggaggaggagagaagaatgcaggaggagagaagagccgcctgcgccgagaagctgaagagactggacgagaagttcggcgcccccgacaagagactgaaggccgagcccgccgccccccccgccgcccccagcacccccgcccccccccccgccgtgcccaaggagctgcccgccccccccgcccccccccccgccagcgcccccacccccgagaaggagcccgaggagcccgcccaggccccccccgcccagagcacccccacccccggcgtggccgccgcccccaccctggtgagcggcggcggcagcaccagcagcaccagcagcggcagcttcgaggccagccccgtggagccccagctgcccagcaaggagggccccgagccccccgaggaggtgcccccccccaccaccccccccgtgcccaaggtggagcccaagggcgacggcatcggccccaccagacagccccccagccagggcctgggctaccccaagtaccagaagagcctgccccccagattccagagacagcagcaggagcagctgctgaagcagcagcagcagcaccagtggcagcagcaccagcagggcagcgccccccccacccccgtgccccccagccccccccagcccgtgaccctgggcgccgtgcccgccccccaggcccccccccccccccccaaggccctgtaccccggcgccctgggcagacccccccccatgccccccatgaacttcgaccccagatggatgatgatccccccctacgtggaccccagactgctgcagggcagaccccccctggacttctacccccccggcgtgcaccccagcggcctggtgcccagagagagaagcgacagcggcggcagcagcagcgagcccttcgacagacacgcccccgccatgctgagagagagaggcaccccccccgtggaccccaagctggcctgggtgggcgacgtgttcaccgccacccccgccgagcccagacccctgaccagccccctgagacaggccgccgacgaggacgacaagggcatgagaagcgagaccccccccgtgccccccccccccccctacctggccagctaccccggcttccccgagaacggcgcccccggcccccccatcagcagattccccctggaggagcccggccccagacccctgccctggccccccggcagcgacgaggtggccaagatccagacccccccccccaagaaggagccccccaaggaggagaccgcccagctgaccggccccgaggccggcagaaagcccgccagaggcgtgggcagcggcggccagggcccccccccccccagaagagagagcagaaccgagaccagatggggccccagacccggcagcagcagaagaggcatcccccccgaggagcccggcgccccccccagaagagccggccccatcaagaagccccccccccccaccaaggtggaggagctgccccccaagcccctggagcagggcgacgagacccccaagccccccaagcccgaccccctgaagatcaccaagggcaagctgggcggccccaaggagaccccccccaacggcaacctgagccccgcccccagactgagaagagactacagctacgagagagtgggccccaccagctgcagaggcagaggcagaggcgagtacttcgccagaggcagaggcttcagaggcacctacggcggcagaggcagaggcgccgccggcaacagcgccgtgaccgagagcttcgaggagatgatgggcgtggaggtgggccagggcgaccagaccaccctgctgctgcccgaggccgccctgcccgccagacacggcgccagagtgcagagcatgagaaagagccccagcggcgccggcagcggcgcccagaagcaggccgccagacccatgagagtgatctggctgctgcagaccagaagactgccccaccccagaagagagcacagccccagaagcagaagccccaccaccagaagccccaccttccccgcccccgccagattcacccccggcgtgggcgagagcagcctgcccgagggcatcagccccggccccagaagaagagagcccccccaggtgtgccccggctggagcccccccgccaagagcctggcccccaagaagccccccaccggccccctgccccccagcaaggagcccctgaaggagaagctgatccccggccccctgagccccgtggccagaggcggcagcaacggcggcagcaacgtgggcatggaggacggcgagagacccagaagaagaagacacggcagagcccagcagcaggacaagccccccagattcagaagactgaagcaggagagagagaacgccgccagaggcagcgagggcaagcccagcctgaccctgcccgccagcgcccccggccccgaggaggccctgaccaccgtgaccgtggcccccgcccccagaagagccgccgccaagagccccgacctgagcaaccagaacagcgaccaggccaacgaggagtgggagaccgccagcgagagcagcgacttcaccagcgagagaagaggcgacaaggaggcccccccccccgtgctgctgacccccaaggccgtgggcacccccggcggcggcggcggcggcgccgtgcccggcatcagcgccatgagcagaggcgacctgagccagagagccaaggacctgagcaagagaagcttcagcagccagagacccggcatggagagacagaacagaagacccggccccggcggcaaggccggcagcagcggcagcagcagcggcggcggcggcggcggccccggcggcagaaccggccccggcagaggcgacaagagaagctggcccagccccaagaacagaagcagaccccccgaggagagaccccccggcctgcccctgcccccccccccccccagcagcagcgccgtgttcagactggaccaggtgatccacagcaaccccgccggcatccagcaggccctggcccagctgagcagcagacagggcagcgtgaccgcccccggcggccaccccagacacaagcccggccccccccaggccccccagggccccagccccagaccccccaccagatacgagccccagagagtgaacagcggcctgagcagcgacccccacttcgaggagcccggccccatggtgagaggcgtgggcggcacccccagagacagcgccggcgtgagccccttcccccccaagagaagagagagaccccccagaaagcccgagctgctgcaggaggagagcctgccccccccccacagcagcggcttcctgggcagcaagcccgagggccccggcccccaggccgagagcagagacaccggcaccgaggccctgaccccccacatctggaacagactgcacaccgccaccagcagaaagagctacagacccagcagcatggagccctggatggagcccctgagccccttcgaggacgtggccggcaccgagatgagccagagcgacagcggcgtggacctgagcggcgacagccaggtgagcagcggcccctgcagccagagaagcagccccgacggcggcctgaagggcgccgccgagggcccccccaagagacccggcggcagcagccccctgaacgccgtgccctgcgagggcccccccggcagcgagccccccagaagacccccccccgccccccacgacggcgacagaaaggagctgcccagagagcagcccctgccccccggccccatcggcaccgagagaagccagcacaccgacagaggcaccgagcccggccccatcagacccagccacagacccggcccccccgtgcagttcggcaccagcgacaaggacagcgacctgagactggtggtgggcgacagcctgaaggccgagaaggagctgaccgccagcgtgaccgaggccatccccgtgagcagagactgggagctgctgcccagcgccgccgccagcgccgagccccagagcaagaacctggacagcggccactgcgtgcccgagcccagcagcagcggccagagactgtaccccgaggtgttctacggcagcgccggccccagcagcagccagatcagcggcggccacggcctgagcgtgaccagcaagcagtggagaagacccggcacccccagcctgcacccctacagaagccagcccctgtacctgccccccggccccgccccccccagcgccctgctgagcggcgtggccctgaagggccagttcctggacttcagcaccatgcaggccaccgagctgggcaagctgcccgccggcggcgtgctgtaccccccccccagcttcctgtacagccccgccttctgccccagccccctgcccgacaccagcctgctgcaggtgagacaggacctgcccagccccagcgacttctacagcacccccctgcagcccggcggccagagcggcttcctgcccagcggcgcccccgcccagcagatgctgctgcccatggtggacagccagctgcccgtggtgaacttcggcagcctgccccccgcccccccccccgccccccccagcctgagcctgctgcccgtgggccccgccctgcagccccccagcctggccgtgagacccccccccgcccccgccaccagagtgctgcccagccccgccagacccttccccgccagcctgggcagagccgagctgcaccccgtggagctgaagcccttccaggactaccagaagctgagcagcaacctgggcggccccggcagcagcagaaccccccccaccggcagaagcttcagcggcctgaacagcagactgaaggccacccccagcacctacagcggcgtgttcagaacccagagagtggacctgtaccagcaggccagcccccccgacgccctgagatggatccccaagccctgggagagaaccggccccccccccagagagggccccagcagaagagccgaggagcccggcagcagaggcgacaaggagcccggcctgcccccccccagatag

SEQ ID NO: 344424 - DNA, 6450 bp, Artificial Sequence
  derived and/or modified sequence
atgagcgacagaagcggccccaccgccaagggcaaggacggcaagaagtacagcagcctgaacctgttcgacacctacaagggcaagagcctggagatccagaagcccgccgtggcccccagacacggcctgcagagcctgggcaaggtggccatcgccagaagaatgcccccccccgccaacctgcccagcctgaaggccgagaacaagggcaacgaccccaacgtgagcctggtgcccaaggacggcaccggctgggccagcaagcaggagcagagcgaccccaagagcagcgacgccagcaccgcccagccccccgagagccagcccctgcccgccagccagacccccgccagcaaccagcccaagagaccccccgccgcccccgagaacacccccctggtgcccagcggcgtgaagagctgggcccaggccagcgtgacccacggcgcccacggcgacggcggcagagccagcagcctgctgagcagattcagcagagaggagttccccaccctgcaggccgccggcgaccaggacaaggccgccaaggagagagagagcgccgagcagagcagcggccccggccccagcctgagaccccagaacagcaccacctggagagacggcggcggcagaggccccgacgagctggagggccccgacagcaagctgcaccacggccacgaccccagaggcggcctgcagcccagcggccccccccagttccccccctacagaggcatgatgccccccttcatgtaccccccctacctgcccttcccccccccctacggcccccagggcccctacagataccccacccccgacggccccagcagattccccagagtggccggccccagaggcagcggcccccccatgagactggtggagcccgtgggcagacccagcatcctgaaggaggacaacctgaaggagttcgaccagctggaccaggagaacgacgacggctgggccggcgcccacgaggaggtggactacaccgagaagctgaagttcagcgacgaggaggacggcagagacagcgacgaggagggcgccgagggccacagagacagccagagcgccagcggcgaggagagaccccccgaggccgacggcaagaagggcaacagccccaacagcgagccccccacccccaagaccgcctgggccgagaccagcagaccccccgagaccgagcccggcccccccgcccccaagccccccctgccccccccccacagaggccccgccggcaactggggcccccccggcgactaccccgacagaggcggccccccctgcaagccccccgcccccgaggacgaggacgaggcctggagacagagaagaaagcagagcagcagcgagatcagcctggccgtggagagagccagaagaagaagagaggaggaggagagaagaatgcaggaggagagaagagccgcctgcgccgagaagctgaagagactggacgagaagttcggcgcccccgacaagagactgaaggccgagcccgccgccccccccgccgcccccagcacccccgcccccccccccgccgtgcccaaggagctgcccgccccccccgcccccccccccgccagcgcccccacccccgagaaggagcccgaggagcccgcccaggccccccccgcccagagcacccccacccccggcgtggccgccgcccccaccctggtgagcggcggcggcagcaccagcagcaccagcagcggcagcttcgaggccagccccgtggagccccagctgcccagcaaggagggccccgagccccccgaggaggtgcccccccccaccaccccccccgtgcccaaggtggagcccaagggcgacggcatcggccccaccagacagccccccagccagggcctgggctaccccaagtaccagaagagcctgccccccagattccagagacagcagcaggagcagctgctgaagcagcagcagcagcaccagtggcagcagcaccagcagggcagcgccccccccacccccgtgccccccagccccccccagcccgtgaccctgggcgccgtgcccgccccccaggcccccccccccccccccaaggccctgtaccccggcgccctgggcagacccccccccatgccccccatgaacttcgaccccagatggatgatgatccccccctacgtggaccccagactgctgcagggcagaccccccctggacttctacccccccggcgtgcaccccagcggcctggtgcccagagagagaagcgacagcggcggcagcagcagcgagcccttcgacagacacgcccccgccatgctgagagagagaggcaccccccccgtggaccccaagctggcctgggtgggcgacgtgttcaccgccacccccgccgagcccagacccctgaccagccccctgagacaggccgccgacgaggacgacaagggcatgagaagcgagaccccccccgtgccccccccccccccctacctggccagctaccccggcttccccgagaacggcgcccccggcccccccatcagcagattccccctggaggagcccggccccagacccctgccctggccccccggcagcgacgaggtggccaagatccagacccccccccccaagaaggagccccccaaggaggagaccgcccagctgaccggccccgaggccggcagaaagcccgccagaggcgtgggcagcggcggccagggcccccccccccccagaagagagagcagaaccgagaccagatggggccccagacccggcagcagcagaagaggcatcccccccgaggagcccggcgccccccccagaagagccggccccatcaagaagccccccccccccaccaaggtggaggagctgccccccaagcccctggagcagggcgacgagacccccaagccccccaagcccgaccccctgaagatcaccaagggcaagctgggcggccccaaggagaccccccccaacggcaacctgagccccgcccccagactgagaagagactacagctacgagagagtgggccccaccagctgcagaggcagaggcagaggcgagtacttcgccagaggcagaggcttcagaggcacctacggcggcagaggcagaggcgccgccggcaacagcgccgtgaccgagagcttcgaggagatgatgggcgtggaggtgggccagggcgaccagaccaccctgctgctgcccgaggccgccctgcccgccagacacggcgccagagtgcagagcatgagaaagagccccagcggcgccggcagcggcgcccagaagcaggccgccagacccatgagagtgatctggctgctgcagaccagaagactgccccaccccagaagagagcacagccccagaagcagaagccccaccaccagaagccccaccttccccgcccccgccagattcacccccggcgtgggcgagagcagcctgcccgagggcatcagccccggccccagaagaagagagcccccccaggtgtgccccggctggagcccccccgccaagagcctggcccccaagaagccccccaccggccccctgccccccagcaaggagcccctgaaggagaagctgatccccggccccctgagccccgtggccagaggcggcagcaacggcggcagcaacgtgggcatggaggacggcgagagacccagaagaagaagacacggcagagcccagcagcaggacaagccccccagattcagaagactgaagcaggagagagagaacgccgccagaggcagcgagggcaagcccagcctgaccctgcccgccagcgcccccggccccgaggaggccctgaccaccgtgaccgtggcccccgcccccagaagagccgccgccaagagccccgacctgagcaaccagaacagcgaccaggccaacgaggagtgggagaccgccagcgagagcagcgacttcaccagcgagagaagaggcgacaaggaggcccccccccccgtgctgctgacccccaaggccgtgggcacccccggcggcggcggcggcggcgccgtgcccggcatcagcgccatgagcagaggcgacctgagccagagagccaaggacctgagcaagagaagcttcagcagccagagacccggcatggagagacagaacagaagacccggccccggcggcaaggccggcagcagcggcagcagcagcggcggcggcggcggcggccccggcggcagaaccggccccggcagaggcgacaagagaagctggcccagccccaagaacagaagcagaccccccgaggagagaccccccggcctgcccctgcccccccccccccccagcagcagcgccgtgttcagactggaccaggtgatccacagcaaccccgccggcatccagcaggccctggcccagctgagcagcagacagggcagcgtgaccgcccccggcggccaccccagacacaagcccggccccccccaggccccccagggccccagccccagaccccccaccagatacgagccccagagagtgaacagcggcctgagcagcgacccccacttcgaggagcccggccccatggtgagaggcgtgggcggcacccccagagacagcgccggcgtgagccccttcccccccaagagaagagagagaccccccagaaagcccgagctgctgcaggaggagagcctgccccccccccacagcagcggcttcctgggcagcaagcccgagggccccggcccccaggccgagagcagagacaccggcaccgaggccctgaccccccacatctggaacagactgcacaccgccaccagcagaaagagctacagacccagcagcatggagccctggatggagcccctgagccccttcgaggacgtggccggcaccgagatgagccagagcgacagcggcgtggacctgagcggcgacagccaggtgagcagcggcccctgcagccagagaagcagccccgacggcggcctgaagggcgccgccgagggcccccccaagagacccggcggcagcagccccctgaacgccgtgccctgcgagggcccccccggcagcgagccccccagaagacccccccccgccccccacgacggcgacagaaaggagctgcccagagagcagcccctgccccccggccccatcggcaccgagagaagccagcacaccgacagaggcaccgagcccggccccatcagacccagccacagacccggcccccccgtgcagttcggcaccagcgacaaggacagcgacctgagactggtggtgggcgacagcctgaaggccgagaaggagctgaccgccagcgtgaccgaggccatccccgtgagcagagactgggagctgctgcccagcgccgccgccagcgccgagccccagagcaagaacctggacagcggccactgcgtgcccgagcccagcagcagcggccagagactgtaccccgaggtgttctacggcagcgccggccccagcagcagccagatcagcggcggccacggcctgagcgtgaccagcaagcagtggagaagacccggcacccccagcctgcacccctacagaagccagcccctgtacctgccccccggccccgccccccccagcgccctgctgagcggcgtggccctgaagggccagttcctggacttcagcaccatgcaggccaccgagctgggcaagctgcccgccggcggcgtgctgtaccccccccccagcttcctgtacagccccgccttctgccccagccccctgcccgacaccagcctgctgcaggtgagacaggacctgcccagccccagcgacttctacagcacccccctgcagcccggcggccagagcggcttcctgcccagcggcgcccccgcccagcagatgctgctgcccatggtggacagccagctgcccgtggtgaacttcggcagcctgccccccgcccccccccccgccccccccagcctgagcctgctgcccgtgggccccgccctgcagccccccagcctggccgtgagacccccccccgcccccgccaccagagtgctgcccagccccgccagacccttccccgccagcctgggcagagccgagctgcaccccgtggagctgaagcccttccaggactaccagaagctgagcagcaacctgggcggccccggcagcagcagaaccccccccaccggcagaagcttcagcggcctgaacagcagactgaaggccacccccagcacctacagcggcgtgttcagaacccagagagtggacctgtaccagcaggccagcccccccgacgccctgagatggatccccaagccctgggagagaaccggccccccccccagagagggccccagcagaagagccgaggagcccggcagcagaggcgacaaggagcccggcctgcccccccccagatag

SEQ ID NO: 344425 - DNA, 4149 bp, Artificial Sequence
  derived and/or modified sequence
atgctgagagagagaggcaccccccccgtggaccccaagctggcctgggtgggcgacgtgttcaccgccacccccgccgagcccagacccctgaccagccccctgagacaggccgccgacgaggacgacaagggcatgagaagcgagaccccccccgtgccccccccccccccctacctggccagctaccccggcttccccgagaacggcgcccccggcccccccatcagcagattccccctggaggagcccggccccagacccctgccctggccccccggcagcgacgaggtggccaagatccagacccccccccccaagaaggagccccccaaggaggagaccgcccagctgaccggccccgaggccggcagaaagcccgccagaggcgtgggcagcggcggccagggcccccccccccccagaagagagagcagaaccgagaccagatggggccccagacccggcagcagcagaagaggcatcccccccgaggagcccggcgccccccccagaagagccggccccatcaagaagccccccccccccaccaaggtggaggagctgccccccaagcccctggagcagggcgacgagacccccaagccccccaagcccgaccccctgaagatcaccaagggcaagctgggcggccccaaggagaccccccccaacggcaacctgagccccgcccccagactgagaagagactacagctacgagagagtgggccccaccagctgcagaggcagaggcagaggcgagtacttcgccagaggcagaggcttcagaggcacctacggcggcagaggcagaggcgccagaagcagagagttcagaagctacagagagttcagaggcgacgacggcagaggcggcggcaccggcggccccaaccacccccccgcccccagaggcagaaccgccagcgagaccagaagcgagggcagcgagtacgaggagatccccaagagaagaagacagagaggcagcgagaccggcagcgagacccacgagagcgacctggcccccagcgacaaggaggcccccacccccaaggagggcaccctgacccaggtgcccctggccccccccccccccggcgccccccccagccccgcccccgccagattcaccgccagaggcggcagagtgttcacccccagaggcgtgcccagcagaagaggcagaggcggcggcagaccccccccccaggtgtgccccggctggagcccccccgccaagagcctggcccccaagaagccccccaccggccccctgccccccagcaaggagcccctgaaggagaagctgatccccggccccctgagccccgtggccagaggcggcagcaacggcggcagcaacgtgggcatggaggacggcgagagacccagaagaagaagacacggcagagcccagcagcaggacaagccccccagattcagaagactgaagcaggagagagagaacgccgccagaggcagcgagggcaagcccagcctgaccctgcccgccagcgcccccggccccgaggaggccctgaccaccgtgaccgtggcccccgcccccagaagagccgccgccaagagccccgacctgagcaaccagaacagcgaccaggccaacgaggagtgggagaccgccagcgagagcagcgacttcaccagcgagagaagaggcgacaaggaggcccccccccccgtgctgctgacccccaaggccgtgggcacccccggcggcggcggcggcggcgccgtgcccggcatcagcgccatgagcagaggcgacctgagccagagagccaaggacctgagcaagagaagcttcagcagccagagacccggcatggagagacagaacagaagacccggccccggcggcaaggccggcagcagcggcagcagcagcggcggcggcggcggcggccccggcggcagaaccggccccggcagaggcgacaagagaagctggcccagccccaagaacagaagcagaccccccgaggagagaccccccggcctgcccctgcccccccccccccccagcagcagcgccgtgttcagactggaccaggtgatccacagcaaccccgccggcatccagcaggccctggcccagctgagcagcagacagggcagcgtgaccgcccccggcggccaccccagacacaagcccggccccccccaggccccccagggccccagccccagaccccccaccagatacgagccccagagagtgaacagcggcctgagcagcgacccccacttcgaggagcccggccccatggtgagaggcgtgggcggcacccccagagacagcgccggcgtgagccccttcccccccaagagaagagagagaccccccagaaagcccgagctgctgcaggaggagagcctgccccccccccacagcagcggcttcctgggcagcaagcccgagggccccggcccccaggccgagagcagagacaccggcaccgaggccctgaccccccacatctggaacagactgcacaccgccaccagcagaaagagctacagacccagcagcatggagccctggatggagcccctgagccccttcgaggacgtggccggcaccgagatgagccagagcgacagcggcgtggacctgagcggcgacagccaggtgagcagcggcccctgcagccagagaagcagccccgacggcggcctgaagggcgccgccgagggcccccccaagagacccggcggcagcagccccctgaacgccgtgccctgcgagggcccccccggcagcgagccccccagaagacccccccccgccccccacgacggcgacagaaaggagctgcccagagagcagcccctgccccccggccccatcggcaccgagagaagccagcacaccgacagaggcaccgagcccggccccatcagacccagccacagacccggcccccccgtgcagttcggcaccagcgacaaggacagcgacctgagactggtggtgggcgacagcctgaaggccgagaaggagctgaccgccagcgtgaccgaggccatccccgtgagcagagactgggagctgctgcccagcgccgccgccagcgccgagccccagagcaagaacctggacagcggccactgcgtgcccgagcccagcagcagcggccagagactgtaccccgaggtgttctacggcagcgccggccccagcagcagccagatcagcggcggcgccatggacagccagctgcaccccaacagcggcggcttcagacccggcacccccagcctgcacccctacagaagccagcccctgtacctgccccccggccccgccccccccagcgccctgctgagcggcgtggccctgaagggccagttcctggacttcagcaccatgcaggccaccgagctgggcaagctgcccgccggcggcgtgctgtaccccccccccagcttcctgtacagccccgccttctgccccagccccctgcccgacaccagcctgctgcaggtgagacaggacctgcccagccccagcgacttctacagcacccccctgcagcccggcggccagagcggcttcctgcccagcggcgcccccgcccagcagatgctgctgcccatggtggacagccagctgcccgtggtgaacttcggcagcctgccccccgcccccccccccgccccccccagcctgagcctgctgcccgtgggccccgccctgcagccccccagcctggccgtgagacccccccccgcccccgccaccagagtgctgcccagccccgccagacccttccccgccagcctgggcagagccgagctgcaccccgtggagctgaagcccttccaggactaccagaagctgagcagcaacctgggcggccccggcagcagcagaaccccccccaccggcagaagcttcagcggcctgaacagcagactgaaggccacccccagcacctacagcggcgtgttcagaacccagagagtggacctgtaccagcaggccagcccccccgacgccctgagatggatccccaagccctgggagagaaccggccccccccccagagagggccccagcagaagagccgaggagcccggcagcagaggcgacaaggagcccggcctgcccccccccagatag

SEQ ID NO: 344426 - protein, 549 aa, Artificial Sequence
  derived and/or modified sequence
MSDRSGPTAKGKDGKKYSSLNLFDTYKGKSLEIQKPAVAPRHGLQSLGKVAIARRMPPPANLPSLKAENKGNDPNVSLVPKDGTGWASKQEQSDPKSSDASTAQPPESQPLPASQTPASNQPKRPPAAPENTPLVPSGVKSWAQASVTHGAHGDGGRASSLLSRFSREEFPTLQAAGDQDKAAKERESAEQSSGPGPSLRPQNSTTWRDGGGRGPDELEGPDSKLHHGHDPRGGLQPSGPPQFPPYRGMMPPFMYPPYLPFPPPYGPQGPYRYPTPDGPSRFPRVAGPRGSGPPMRLVEPVGRPSILKEDNLKEFDQLDQENDDGWAGAHEEVDYTEKLKFSDEEDGRDSDEEGAEGHRDSQSASGEERPPEADGKKGNSPNSEPPTPKTAWAETSRPPETEPGPPAPKPPLPPPHRGPAGNWGPPGDYPDRGGPPCKPPAPEDEDEAWRQRRKQSSSEISLAVERARRRREEEERRMQEERRAACAEKLKRLDEKFGAPDKRLKAEPAAPPAAPSTPAPPPAASEVPLMEDSRGQQRDPPRGLEAPHP

SEQ ID NO: 344427 - protein, 2138 aa, Artificial Sequence
  derived and/or modified sequence
MSDRSGPTAKGKDGKKYSSLNLFDTYKGKSLEIQKPAVAPRHGLQSLGKVAIARRMPPPANLPSLKAENKGNDPNVSLVPKDGTGWASKQEQSDPKSSDASTAQPPESQPLPASQTPASNQPKRPPAAPENTPLVPSGVKSWAQASVTHGAHGDGGRASSLLSRFSREEFPTLQAAGDQDKAAKERESAEQSSGPGPSLRPQNSTTWRDGGGRGPDELEGPDSKLHHGHDPRGGLQPSGPPQFPPYRGMMPPFMYPPYLPFPPPYGPQGPYRYPTPDGPSRFPRVAGPRGSGPPMRLVEPVGRPSILKEDNLKEFDQLDQENDDGWAGAHEEVDYTEKLKFSDEEDGRDSDEEGAEGHRDSQSASGEERPPEADGKKGNSPNSEPPTPKTAWAETSRPPETEPGPPAPKPPLPPPGDYPDRGGPPCKPPAPEDEDEAWRQRRKQSSSEISLAVERARRRREEEERRMQEERRAACAEKLKRLDEKFGAPDKRLKAEPAAPPAAPSTPAPPPAVPKELPAPPAPPPASAPTPEKEPEEPAQAPPAQSTPTPGVAAAPTLVSGGGSTSSTSSGSFEASPVEPQLPSKEGPEPPEEVPPPTTPPVPKVEPKGDGIGPTRQPPSQGLGYPKYQKSLPPRFQRQQQEQLLKQQQQHQWQQHQQGSAPPTPVPPSPPQPVTLGAVPAPQAPPPPPKALYPGALGRPPPMPPMNFDPRWMMIPPYVDPRLLQGRPPLDFYPPGVHPSGLVPRERSDSGGSSSEPFDRHAPAMLRERGTPPVDPKLAWVGDVFTATPAEPRPLTSPLRQAADEDDKGMRSETPPVPPPPPYLASYPGFPENGAPGPPISRFPLEEPGPRPLPWPPGSDEVAKIQTPPPKKEPPKEETAQLTGPEAGRKPARGVGSGGQGPPPPRRESRTETRWGPRPGSSRRGIPPEEPGAPPRRAGPIKKPPPPTKVEELPPKPLEQGDETPKPPKPDPLKITKGKLGGPKETPPNGNLSPAPRLRRDYSYERVGPTSCRGRGRGEYFARGRGFRGTYGGRGRGAAGNSAVTESFEEMMGVEVGQGDQTTLLLPEAALPARHGARVQSMRKSPSGAGSGAQKQAARPMRVIWLLQTRRLPHPRREHSPRSRSPTTRSPTFPAPARFTPGVGESSLPEGISPGPRRREPPQVCPGWSPPAKSLAPKKPPTGPLPPSKEPLKEKLIPGPLSPVARGGSNGGSNVGMEDGERPRRRRHGRAQQQDKPPRFRRLKQERENAARGSEGKPSLTLPASAPGPEEALTTVTVAPAPRRAAAKSPDLSNQNSDQANEEWETASESSDFTSERRGDKEAPPPVLLTPKAVGTPGGGGGGAVPGISAMSRGDLSQRAKDLSKRSFSSQRPGMERQNRRPGPGGKAGSSGSSSGGGGGGPGGRTGPGRGDKRSWPSPKNRSRPPEERPPGLPLPPPPPSSSAVFRLDQVIHSNPAGIQQALAQLSSRQGSVTAPGGHPRHKPGPPQAPQGPSPRPPTRYEPQRVNSGLSSDPHFEEPGPMVRGVGGTPRDSAGVSPFPPKRRERPPRKPELLQEESLPPPHSSGFLGSKPEGPGPQAESRDTGTEALTPHIWNRLHTATSRKSYRPSSMEPWMEPLSPFEDVAGTEMSQSDSGVDLSGDSQVSSGPCSQRSSPDGGLKGAAEGPPKRPGGSSPLNAVPCEGPPGSEPPRRPPPAPHDGDRKELPREQPLPPGPIGTERSQHTDRGTEPGPIRPSHRPGPPVQFGTSDKDSDLRLVVGDSLKAEKELTASVTEAIPVSRDWELLPSAAASAEPQSKNLDSGHCVPEPSSSGQRLYPEVFYGSAGPSSSQISGGHGLSVTSKQWRRPGTPSLHPYRSQPLYLPPGPAPPSALLSGVALKGQFLDFSTMQATELGKLPAGGVLYPPPSFLYSPAFCPSPLPDTSLLQVRQDLPSPSDFYSTPLQPGGQSGFLPSGAPAQQMLLPMVDSQLPVVNFGSLPPAPPPAPPSLSLLPVGPALQPPSLAVRPPPAPATRVLPSPARPFPASLGRAELHPVELKPFQDYQKLSSNLGGPGSSRTPPTGRSFSGLNSRLKATPSTYSGVFRTQRVDLYQQASPPDALRWIPKPWERTGPPPREGPSRRAEEPGSRGDKEPGLPPPR

SEQ ID NO: 344428 - protein, 2138 aa, Artificial Sequence
  derived and/or modified sequence
MSDRSGPTAKGKDGKKYSSLNLFDTYKGKSLEIQKPAVAPRHGLQSLGKVAIARRMPPPANLPSLKAENKGNDPNVSLVPKDGTGWASKQEQSDPKSSDASTAQPPESQPLPASQTPASNQPKRPPAAPENTPLVPSGVKSWAQASVTHGAHGDGGRASSLLSRFSREEFPTLQAAGDQDKAAKERESAEQSSGPGPSLRPQNSTTWRDGGGRGPDELEGPDSKLHHGHDPRGGLQPSGPPQFPPYRGMMPPFMYPPYLPFPPPYGPQGPYRYPTPDGPSRFPRVAGPRGSGPPMRLVEPVGRPSILKEDNLKEFDQLDQENDDGWAGAHEEVDYTEKLKFSDEEDGRDSDEEGAEGHRDSQSASGEERPPEADGKKGNSPNSEPPTPKTAWAETSRPPETEPGPPAPKPPLPPPGDYPDRGGPPCKPPAPEDEDEAWRQRRKQSSSEISLAVERARRRREEEERRMQEERRAACAEKLKRLDEKFGAPDKRLKAEPAAPPAAPSTPAPPPAVPKELPAPPAPPPASAPTPEKEPEEPAQAPPAQSTPTPGVAAAPTLVSGGGSTSSTSSGSFEASPVEPQLPSKEGPEPPEEVPPPTTPPVPKVEPKGDGIGPTRQPPSQGLGYPKYQKSLPPRFQRQQQEQLLKQQQQHQWQQHQQGSAPPTPVPPSPPQPVTLGAVPAPQAPPPPPKALYPGALGRPPPMPPMNFDPRWMMIPPYVDPRLLQGRPPLDFYPPGVHPSGLVPRERSDSGGSSSEPFDRHAPAMLRERGTPPVDPKLAWVGDVFTATPAEPRPLTSPLRQAADEDDKGMRSETPPVPPPPPYLASYPGFPENGAPGPPISRFPLEEPGPRPLPWPPGSDEVAKIQTPPPKKEPPKEETAQLTGPEAGRKPARGVGSGGQGPPPPRRESRTETRWGPRPGSSRRGIPPEEPGAPPRRAGPIKKPPPPTKVEELPPKPLEQGDETPKPPKPDPLKITKGKLGGPKETPPNGNLSPAPRLRRDYSYERVGPTSCRGRGRGEYFARGRGFRGTYGGRGRGAAGNSAVTESFEEMMGVEVGQGDQTTLLLPEAALPARHGARVQSMRKSPSGAGSGAQKQAARPMRVIWLLQTRRLPHPRREHSPRSRSPTTRSPTFPAPARFTPGVGESSLPEGISPGPRRREPPQVCPGWSPPAKSLAPKKPPTGPLPPSKEPLKEKLIPGPLSPVARGGSNGGSNVGMEDGERPRRRRHGRAQQQDKPPRFRRLKQERENAARGSEGKPSLTLPASAPGPEEALTTVTVAPAPRRAAAKSPDLSNQNSDQANEEWETASESSDFTSERRGDKEAPPPVLLTPKAVGTPGGGGGGAVPGISAMSRGDLSQRAKDLSKRSFSSQRPGMERQNRRPGPGGKAGSSGSSSGGGGGGPGGRTGPGRGDKRSWPSPKNRSRPPEERPPGLPLPPPPPSSSAVFRLDQVIHSNPAGIQQALAQLSSRQGSVTAPGGHPRHKPGPPQAPQGPSPRPPTRYEPQRVNSGLSSDPHFEEPGPMVRGVGGTPRDSAGVSPFPPKRRERPPRKPELLQEESLPPPHSSGFLGSKPEGPGPQAESRDTGTEALTPHIWNRLHTATSRKSYRPSSMEPWMEPLSPFEDVAGTEMSQSDSGVDLSGDSQVSSGPCSQRSSPDGGLKGAAEGPPKRPGGSSPLNAVPCEGPPGSEPPRRPPPAPHDGDRKELPREQPLPPGPIGTERSQRTDRGTEPGPIRPSHRPGPPVQFGTSDKDSDLRLVVGDSLKAEKELTASVTEAIPVSRDWELLPSAAASAEPQSKNLDSGHCVPEPSSSGQRLYPEVFYGSAGPSSSQISGGHGLSITSKQWRRPGTPSLHPYRSQPLYLPPGPAPPSALLSGVALKGQFLDFSTMQATELGKLPAGGVLYPPPSFLYSPAFCPSPLPDTSLLQVRQDLPSPSDFYSTPLQPGGQSGFLPSGAPAQQMLLPMVDSQLPVVNFGSLPPAPPPAPPPLSLLPVGPALQPPSLAVRPPPAPATRVLPSPARPFPASLGRAELHPVELKPFQDYQKLSSNLGGPGSSRTPPTGRSFSGLNSRLKATPSTYSGVFRTQRVDLYQQASPPDALRWIPKPWERTGPPPREGPSRRAEEPGSRGDKEPGLPPPR

SEQ ID NO: 344429 - protein, 356 aa, Artificial Sequence
  derived and/or modified sequence
MSRPLLITFTPATDPSDLWKDGQQQPQPEKPESTLDGAAALAFYEALIGDESSAPDSQRSQTEPARERKRKKRRIMKAPAAEAVAEGASGRHGQGRSLEAEDKMTHRILRAAQEGDLPELRRLLEPHEAGGAGGNINARDAFWWTPLMCAARAGQGAAVSYLLGRGAAWVGVCELSGRDAAQLAEEAGFPEVARMVRESHGETRSPENRSPTPSLQYCENCDTHFQDSNHRTSTAHLLSLSQGPQPPNLPLGVPISSPGFKLLLRGGWEPGMGLGPRGEGRANPIPTVLKRDQEGLGYRSAPQPRVTHFPAWDTRAVAGRERPPRVATLSWREERRREEKDRAWERDLRTYMNLEF

SEQ ID NO: 344430 - protein, 152 aa, Artificial Sequence
  derived and/or modified sequence
MSRPLLITFTPATDPSDLWKDGQQQPQPEKPESTLDGAAALAFYEALIGDESSAPDSQRSQTEPARERKRKKRRIMKAPAAEAVAEGASGRHGQGRSLEAEDKMTHRILRAAQEGDLPELRRLLEPHEAGGAGGNINARDAFWWTPLMCAAR

SEQ ID NO: 344431 - protein, 165 aa, Artificial Sequence
  derived and/or modified sequence
MSRPLLITFTPATDPSDLWKDGQQQPQPEKPESTLDGAAALAFYEALIGDESSAPDSQRSQTEPARERKRKKRRIMKAPAAEAVAEGASGRHGQGRSLEAEDKMTHRILRAAQEGDLPELRRLLEPHEAGGAGGNINARDAFWWTPLMCAARAGQGAAVSYLLGR

SEQ ID NO: 344432 - protein, 90 aa, Artificial Sequence
  derived and/or modified sequence
MSRPLLITFTPATDPSDLWKDGQQQPQPEKPESTLDGAAALAFYEALIGDESSAPDSQRSQTEPARERKRKKRRIMKAPAAEAVAEGASG

SEQ ID NO: 344433 - protein, 107 aa, Artificial Sequence
  derived and/or modified sequence
MSRPLLITFTPATDPSDLWKDGQQQPQPEKPESTLDGAAALAFYEALIGDESSAPDSQRSQTEPARERKRKKRRIMKAPAAEAVAEGASGRHGQGRSLEAEDKMTHR

SEQ ID NO: 344434 - protein, 198 aa, Artificial Sequence
  derived and/or modified sequence
MSRPLLITFTPATDPSDLWKDGQQQPQPEKPESTLDGAAALAFYEALIGDESSAPDSQRSQTEPARERKRKKRRIMKAPAAEAVAEGASGRHGQGRSLEAEDKMTHRILRAAQEGDLPELRRLLEPHEAGGAGGNINARDAFWWTPLMCAARAGQGAAVSYLLGRGAAWVGVCELSGRDAAQLAEEAGFPEVARMVRE

SEQ ID NO: 344435 - DNA, 1071 bp, Artificial Sequence
  derived and/or modified sequence
atgtcccggccattgctgattaccttcacaccagccaccgaccccagtgatttgtggaaggacggccagcagcagcctcagcctgaaaagccagagtcgactctggatggcgctgcagctttagctttctatgaagccctaattggtgatgagtccagtgcccctgactctcagcgaagccagacagaaccagcaagggagaggaagagaaagaaacggcgaattatgaaggctcctgctgcggaggctgtcgctgagggagccagtggcagacatggacaagggagaagtctggaagcagaagacaaaatgactcaccggatcttgcgagcggcccaggagggtgacctccccgagctccggagattgctggagccgcacgaagcagggggggctggcggaaatatcaatgcgagggatgctttttggtggacaccgctgatgtgcgctgctcgcgctggccagggcgccgctgtgtcatatttgctgggccgaggtgccgcctgggtcggggtctgtgagttatccggccgggacgccgcccaattggctgaggaggcgggctttcccgaggttgccaggatggtgcgagagtcccacggcgagaccagaagccccgagaatcgctctcccactccaagcctacaatactgcgagaactgcgatacacatttccaggactcgaatcaccgcacctccacagcccacctgctatctttgtcacaagggccacagccaccaaacctcccactgggtgtgccaataagttctcccggtttcaagctgctgctgcggggaggctgggaacccggaatgggactgggtccaagaggggaaggaagagcgaaccctatccccacagtcctgaaaagagaccaggagggactcggatatcggagcgccccacagccacgtgtaacgcacttcccagcttgggatacacgggcggtggccggaagagagcgaccccccagagttgccaccttaagctggagggaagaaagaagacgagaagaaaaagaccgggcctgggagcgggaccttagaacttacatgaacctggaattctag

SEQ ID NO: 344436 - DNA, 2793 bp, Artificial Sequence
  derived and/or modified sequence
cacatcaaagtccggagaccccatgtgccgctcccagcgacaagggactcggagcagcgacgacttcagactcaccggctggacggggaccaggactggggtggggtagggaagttgctacttccagggaacggcggcgaccgctacagcgcaggccgcggacccgaccgcggcaggcgaagtggggtggggggagtggaaattagggagggtggggaagagggcaacacgcaagcgccaagggtcaggtgccgcggtggatgccgggacacggagtccccggtagagaaagaaactggctaaatgagagaaagcgaactaccaatcccaggatgacccgcgcacgacctggctgtcacgaaggcccggaggagggcgcttgcgggcggggcacaacgagaagccaccggaagcggaagccagaatggcgccattttgcggtacggaagctacacagcaacacgtataggagactctccccgagatcttctagggagtgacccatctatttttgtttgggaagaggaaactccgaaatgggatcgcggaagacttaaagggccaggctgatttttttttcctactggtctctgaggctgtggttgctacagggtcaccacgagcttggcttacttgtctcatccttcccttgcctggtatcattttctcagttctcccaaaagccatgtcccggcccttgctcatcaccttcaccccagccactgaccccagcgacctctggaaggatgggcagcagcagccacagcccgagaagccagagtccaccctggatggggctgcagccctagctttctatgaggccctgattggggatgagagcagcgctcctgactcccagagatctcagactgaacctgccagagaaagaaagagaaagaaaagaagaataatgaaggcaccagcagcagaagcagtggcagaaggagcatcaggaagacatggacaagggagatcccttgaggctgaggataagatgactcaccggatactgagggcagcccaggagggggacctgccagaacttaggagactgctggaaccgcatgaggcaggaggagctggggggaatatcaacgcccgggatgccttctggtggaccccactgatgtgtgctgctcgagcgggccagggggcagctgtgagctatctcctgggccgtggggctgcctgggtgggggtctgtgagctgagtggcagggatgcggctcagctcgctgaagaagctggcttccctgaggtagcccgcatggtcagggagagccatggagagacaaggagcccggaaaaccggtctcctactccctccctccagtactgcgagaactgtgacacccacttccaagattccaaccaccgcacatccactgctcacctgctgtcactgtcgcagggtcctcagcctcccaaccttccacttggggtgcccatctccagcccgggcttcaaactgctgctgagggggggctgggagccaggaatggggctgggaccccggggtgagggccgtgccaatcccatccccactgtcctcaagagggaccaggaaggactaggctacagatcagcaccccagccccgagtgacacatttcccagcttgggatacccgagctgtggctgggagggagagaccccctcgggtggccacactgagctggagggaggagagaaggagggaggagaaagacagggcttgggagcgggatctaaggacttacatgaacctcgagttctgactttggtaaagtctgaccctagtctgctgctgaagtctgaacttgggcctctgacctgggccctttgacttccccttcctgggatctgctcagatgcagatcctgaagtttttggtcaataggctctgtcttcgtgagagacgggctgagagtcagaaataaatcaaccatttgtggtttattcacttttctggaagctattttgaggaagccaaacagaagcctgggagccacatgcaagtcccacctgagtcagaaggggcagcctctccaggtggcatgataaggtcacctccctgccaatctgggttcactttcaggtcccagaccctcctgggagtcccccacctattctttcaacccccctggaccaagaattgcccagcttcgtgcaagtctcacttcccccaggaggagttccctgactacagccaattcactgatttcacaaacataagtccatatactatgtgccaagaatacaggtaaagacattcccaaccctcaaagagttcacagctggagagggaaagtgccatgttatcaatttttttcttttttttttgagatgcagtttcgctctcattgcccaggctggagtgcaatggcatgatctcggctcaccacaacctctgccccccgagttcaagggattctcctgcctcagcctccccagtagctgggattacaggcatgccccaccacgcccagctaattttgtatttttagtagagacggggtttctccatgttggccaagctggtcttgaactcccgacctcaggtgatccgccggcctcggcttcccaaagtgctggggttgcaggcatgagccaccactcccggcccatgttatcaaatattataatgcagggtgataagggaagtcaaggcctctagagatgagaatgggtagggttttgctggaagaggccagtgtgataggaaggcccacgattatcaagcttgtacacttagttgaactgggaccagaactctagcccccaaatctaaactttaaacttctttgttccaccc

SEQ ID NO: 344437 - DNA, 1598 bp, Artificial Sequence
  derived and/or modified sequence
cagagacccttgacgggcatactgtttcctccgggctcctgcctcatgaggggagaggtgcggcttggctccaatggcgccattttgcggtacggaagctacacagcaacacgtataggagactctccccgagatcttctagggagtgacccatctatttttgtttgggaagaggaaactccgaaatgggatcgcggaagacttaaagggccaggctgatttttttttcctactgcaggtctctgaggctgtggttgctacagggtcaccacgagcttggcttacttgtctcatccttcccttgcctggtatcattttctcagttctcccaaaagccatgtcccggcccttgctcatcaccttcaccccagccactgaccccagcgacctctggaaggatgggcagcagcagccacagcccgagaagccagagtccaccctggatggggctgcagccctagctttctatgaggccctgattggggatgagagcagcgctcctgactcccagagatctcagactgaacctgccagagaaagaaagagaaagaaaagaagaataatgaaggcaccagcagcagaagcagtggcagaaggagcatcaggaagacatggacaagggagatcccttgaggctgaggataagatgactcaccggatactgagggcagcccaggagggggacctgccagaacttaggagactgctggaaccgcatgaggcaggaggagctggggggaatatcaacgcccgggatgccttctggtggaccccactgatgtgtgctgctcgagcgggccagggggcagctgtgagctatctcctgggccgtggggctgcctgggtgggggtctgtgagctgagtggcagggatgcggctcagctcgctgaagaagctggcttccctgaggtagcccgcatggtcagggagagccatggagagacaaggagcccggaaaaccggtctcctactccctccctccagtactgcgagaactgtgacacccacttccaagattccaaccaccgcacatccactgctcacctgctgtcactgtcgcagggtcctcagcctcccaaccttccacttggggtgcccatctccagcccgggcttcaaactgctgctgagggggggctgggagccaggaatggggctgggaccccggggtgagggccgtgccaatcccatccccactgtcctcaagagagaccaggaaggactaggctacagatcagcaccccagccccgagtgacacatttcccagcttgggatacccgagctgtggctgggagggagagaccccctcgggtggccacactgagctggagggaggagagaaggagggaggagaaagacagggcttgggagcgggatctaaggacttacatgaacctcgagttctgactttggtaaagtctgaccctagtctgctgctgaagtctgaacttgggcctctgacctgggccctttgacttccccttcctgggatctgcccagatgcagatcctgaagtttttggtcaataggctctgtcttcgtgagagacgggctgagagtcagaaataaatcaaccatttgtggtttattcactttt

SEQ ID NO: 344438 - DNA, 1814 bp, Artificial Sequence
  derived and/or modified sequence
ggtatggcgttcggggcccgggagtctgggcaatacagttttgtgctcactgggtgaagaggctgacttagggcggggaaaggagggagccaggctggatctctttccgcagctctcctcacgttcccctctagtcccggcgaggcgctgctgcccaggggactggcctatcctcggccaatccgctgggtccttattgcctgttgggcccctagtgcgaatcagtcccgccagagacccttgacgggcatactgtttcctccgggctcctgcctcatgaggggagagaatggcgccattttgcggtacggaagctacacagcaacacgtataggagactctccccgagatcttctagggagtgacccatctatttttgtttgggaagaggaaactccgaaatgggatcgcggaagacttaaagggccaggctgatttttttttcctactgcaggtctctgaggctgtggttgctacagggtcaccacgagcttggcttacttgtctcatccttcccttgcctggtatcattttctcagttctcccaaaagccatgtcccggcccttgctcatcaccttcaccccagccactgaccccagcgacctctggaaggatgggcagcagcagccacagcccgagaagccagagtccaccctggatggggctgcagccctagctttctatgaggccctgattggggatgagagcagcgctcctgactcccagagatctcagactgaacctgccagagaaagaaagagaaagaaaagaagaataatgaaggcaccagcagcagaagcagtggcagaaggagcatcaggaagacatggacaagggagatcccttgaggctgaggataagatgactcaccggatactgagggcagcccaggagggggacctgccagaacttaggagactgctggaaccgcatgaggcaggaggagctggggggaatatcaacgcccgggatgccttctggtggaccccactgatgtgtgctgctcgagcgggccagggggcagctgtgagctatctcctgggccgtggggctgcctgggtgggggtctgtgagctgagtggcagggatgcggctcagctcgctgaagaagctggcttccctgaggtagcccgcatggtcagggagagccatggagagacaaggagcccggaaaaccggtctcctactccctccctccagtactgcgagaactgtgacacccacttccaagattccaaccaccgcacatccactgctcacctgctgtcactgtcgcagggtcctcagcctcccaaccttccacttggggtgcccatctccagcccgggcttcaaactgctgctgagggggggctgggagccaggaatggggctgggaccccggggtgagggccgtgccaatcccatccccactgtcctcaagagagaccaggaaggactaggctacagatcagcaccccagccccgagtgacacatttcccagcttgggatacccgagctgtggctgggagggagagaccccctcgggtggccacactgagctggagggaggagagaaggagggaggagaaagacagggcttgggagcgggatctaaggacttacatgaacctcgagttctgactttggtaaagtctgaccctagtctgctgctgaagtctgaacttgggcctctgacctgggccctttgacttccccttcctgggatctgcccagatgcagatcctgaagtttttggtcaataggctctgtcttcgtgagagacgggctgagagtcagaaataaatcaaccatttgtggtttattcactttt

SEQ ID NO: 344439 - DNA, 1910 bp, Artificial Sequence
  derived and/or modified sequence
aggcgtgacgttatttcattacacggcttctcggcattccacaggtttccctccgcctcctgagggcctttcctaacccacagagtggattcctggctccagaaaatgggcttggagcgggggccacgttgaggaaggcgaagggcattgtgggggcgttatgtaaaagtaggaccccaaccgacagatcctagtgctcgcgccacctgggcgcgcggagctttgctcgtttactattgaaaaagttccagcgcgggaaactgaacccggagctttgcgcacgcccgagccctcaagtaatgtgggttgtggtttttgttgttgttgtcgccacgcatgcgtcttcgtgccgtgtggctatttgattgtgtcaactcttctgattagaatggcgccattttgcggtacggaagctacacagcaacacgtataggagactctccccgagatcttctagggagtgacccatctatttttgtttgggaagaggaaactccgaaatgggatcgcggaagacttaaagggccaggctgatttttttttcctactggtctctgaggctgtggttgctacagggtcaccacgagcttggcttacttgtctcatccttcccttgcctggtatcattttctcagttctcccaaaagccatgtcccggcccttgctcatcaccttcaccccagccactgaccccagcgacctctggaaggatgggcagcagcagccacagcccgagaagccagagtccaccctggatggggctgcagccctagctttctatgaggccctgattggggatgagagcagcgctcctgactcccagagatctcagactgaacctgccagagaaagaaagagaaagaaaagaagaataatgaaggcaccagcagcagaagcagtggcagaaggagcatcaggaagacatggacaagggagatcccttgaggctgaggataagatgactcaccggatactgagggcagcccaggagggggacctgccagaacttaggagactgctggaaccgcatgaggcaggaggagctggggggaatatcaacgcccgggatgccttctggtggaccccactgatgtgtgctgctcgagcgggccagggggcagctgtgagctatctcctgggccgtggggctgcctgggtgggggtctgtgagctgagtggcagggatgcggctcagctcgctgaagaagctggcttccctgaggtagcccgcatggtcagggagagccatggagagacaaggagcccggaaaaccggtctcctactccctccctccagtactgcgagaactgtgacacccacttccaagattccaaccaccgcacatccactgctcacctgctgtcactgtcgcagggtcctcagcctcccaaccttccacttggggtgcccatctccagcccgggcttcaaactgctgctgagggggggctgggagccaggaatggggctgggaccccggggtgagggccgtgccaatcccatccccactgtcctcaagagagaccaggaaggactaggctacagatcagcaccccagccccgagtgacacatttcccagcttgggatacccgagctgtggctgggagggagagaccccctcgggtggccacactgagctggagggaggagagaaggagggaggagaaagacagggcttgggagcgggatctaaggacttacatgaacctcgagttctgactttggtaaagtctgaccctagtctgctgctgaagtctgaacttgggcctctgacctgggccctttgacttccccttcctgggatctgcccagatgcagatcctgaagtttttggtcaataggctctgtcttcgtgagagacgggctgagagtcagaaataaatcaaccatttgtggtttattcactttt

SEQ ID NO: 344440 - DNA, 1800 bp, Artificial Sequence
  derived and/or modified sequence
cggggcccgggagtctgggcaatacagttttgtgctcactgggtgaagaggctgacttagggcggggaaaggagggagccaggctggatctctttccgcagctctcctcacgttcccctctagtcccggcgaggcgctgctgcccaggggactggcctatcctcggccaatccgctgggtccttattgcctgttgggcccctagtgcgaatcagtcccgccagagacccttgacgggcatactgtttcctccgggctcctgcctcatgaggggagagaatggcgccattttgcggtacggaagctacacagcaacacgtataggagactctccccgagatcttctagggagtgacccatctatttttgtttgggaagaggaaactccgaaatgggatcgcggaagacttaaagggccaggctgatttttttttcctactggtctctgaggctgtggttgctacagggtcaccacgagcttggcttacttgtctcatccttcccttgcctggtatcattttctcagttctcccaaaagccatgtcccggcccttgctcatcaccttcaccccagccactgaccccagcgacctctggaaggatgggcagcagcagccacagcccgagaagccagagtccaccctggatggggctgcagccctagctttctatgaggccctgattggggatgagagcagcgctcctgactcccagagatctcagactgaacctgccagagaaagaaagagaaagaaaagaagaataatgaaggcaccagcagcagaagcagtggcagaaggagcatcaggaagacatggacaagggagatcccttgaggctgaggataagatgactcaccggatactgagggcagcccaggagggggacctgccagaacttaggagactgctggaaccgcatgaggcaggaggagctggggggaatatcaacgcccgggatgccttctggtggaccccactgatgtgtgctgctcgagcgggccagggggcagctgtgagctatctcctgggccgtggggctgcctgggtgggggtctgtgagctgagtggcagggatgcggctcagctcgctgaagaagctggcttccctgaggtagcccgcatggtcagggagagccatggagagacaaggagcccggaaaaccggtctcctactccctccctccagtactgcgagaactgtgacacccacttccaagattccaaccaccgcacatccactgctcacctgctgtcactgtcgcagggtcctcagcctcccaaccttccacttggggtgcccatctccagcccgggcttcaaactgctgctgagggggggctgggagccaggaatggggctgggaccccggggtgagggccgtgccaatcccatccccactgtcctcaagagagaccaggaaggactaggctacagatcagcaccccagccccgagtgacacatttcccagcttgggatacccgagctgtggctgggagggagagaccccctcgggtggccacactgagctggagggaggagagaaggagggaggagaaagacagggcttgggagcgggatctaaggacttacatgaacctcgagttctgactttggtaaagtctgaccctagtctgctgctgaagtctgaacttgggcctctgacctgggccctttgacttccccttcctgggatctgcccagatgcagatcctgaagtttttggtcaataggctctgtcttcgtgagagacgggctgagagtcagaaataaatcaaccatttgtggtttattcactttt

SEQ ID NO: 344441 - DNA, 2798 bp, Artificial Sequence
  derived and/or modified sequence
cacatcaaagtccggagaccccatgtgccgctcccagcgacaagggactcggagcagcgacgacttcagactcaccggctggacggggaccaggactggggtggggtagggaagttgctacttccagggaacggcggcgaccgctacagcgcaggccgcggacccgaccgcggcaggcgaagtggggtggggggagtggaaattagggagggtggggaagagggcaacacgcaagcgccaagggtcaggtgccgcggtggatgccgggacacggagtccccggtagagaaagaaactggctaaatgagagaaagcgaactaccaatcccaggatgacccgcgcacgacctggctgtcacgaaggcccggaggagggcgcttgcgggcggggcacaacgagaagccaccggaagcggaagccagaatggcgccattttgcggtacggaagctacacagcaacacgtataggagactctccccgagatcttctagggagtgacccatctatttttgtttgggaagaggaaactccgaaatgggatcgcggaagacttaaagggccaggctgatttttttttcctactggtctctgaggctgtggttgctacagggtcaccacgagcttggcttacttgtctcatccttcccttgcctggtatcattttctcagttctcccaaaagccatgtcccggcccttgctcatcaccttcaccccagccactgaccccagcgacctctggaaggatgggcagcagcagccacagcccgagaagccagagtccaccctggatggggctgcagccctagctttctatgaggccctgattggggatgagagcagcgctcctgactcccagagatctcagactgaacctgccagagaaagaaagagaaagaaaagaagaataatgaaggcaccagcagcagaagcagtggcagaaggagcatcaggaagacatggacaagggagatcccttgaggctgaggataagatgactcaccggatactgagggcagcccaggagggggacctgccagaacttaggagactgctggaaccgcatgaggcaggaggagctggggggaatatcaacgcccgggatgccttctggtggaccccactgatgtgtgctgctcgagcgggccagggggcagctgtgagctatctcctgggccgtggggctgcctgggtgggggtctgtgagctgagtggcagggatgcggctcagctcgctgaagaagctggcttccctgaggtagcccgcatggtcagggagagccatggagagacaaggagcccggaaaaccggtctcctactccctccctccagtactgcgagaactgtgacacccacttccaagattccaaccaccgcacatccactgctcacctgctgtcactgtcgcagggtcctcagcctcccaaccttccacttggggtgcccatctccagcccgggcttcaaactgctgctgagggggggctgggagccaggaatggggctgggaccccggggtgagggccgtgccaatcccatccccactgtcctcaagagagaccaggaaggactaggctacagatcagcaccccagccccgagtgacacatttcccagcttgggatacccgagctgtggctgggagggagagaccccctcgggtggccacactgagctggagggaggagagaaggagggaggagaaagacagggcttgggagcgggatctaaggacttacatgaacctcgagttctgactttggtaaagtctgaccctagtctgctgctgaagtctgaacttgggcctctgacctgggccctttgacttccccttcctgggatctgcccagatgcagatcctgaagtttttggtcaataggctctgtcttcgtgagagacgggctgagagtcagaaataaatcaaccatttgtggtttattcacttttctggaagctattttgaggaagccaaacagaagcctgggagccacatgcaagtcccacctgagtcagaaggggcagcctctccaggtggcatgataaggtcacctccctgccaatctgggttcactttcaggtcccagaccctcctgggagtcccccacctattctttcaacccccctggaccaagaattgcccagcttcgtgcaagtctcacttcccccaggaggagttccctgactacagccaattcactgattcacaaacataagtccatatactatgtgccaagaatacaggtaaagacattcccaaccctcaaagagttcacagctggagagggaaagtgccatgttatcaatttttttctttttttttttgagatgcagtttcgctctcattgcccaggctggagtgcaatggcatgatctcggctcaccacaacctctgccccccgagttcaagggattctcctgcctcagcctccccagtagctgggattacaggcatgccccaccacgcccagctaattttgtatttttagtagagacggggtttctccatgttggccaagctggtcttgaactcccgacctcaggtgatccgccggcctcggcttcccaaagtgctggggttgcaggcatgagccaccactcccggcccatgttatcaaatattataatgcagggtgataagggaagtcaaggcctctagagatgagaatgggtagggttttgctggaagaggccagtgtgataggagggcccacgattatcaagcttgtacacttagttgaactgggaccagaactctagcccccaaatctaaactttaagtcaaacttctttgttccaccc

SEQ ID NO: 344442 - DNA, 822 bp, Artificial Sequence
  derived and/or modified sequence
cgccacctgggcgcgcggagctttgctcgtttactattgaaaaagttccagcgcgggaaactgaacccggagctttgcgcacgcccgagccctcaagtaataatggcgccattttgcggtacggaagctacacagcaacacgtataggagactctccccgagatcttctagggagtgacccatctatttttgtttgggaagaggaaactccgaaatgggatcgcggaagacttaaagggccaggctgatttttttttcctactgcaggtctctgaggctgtggttgctacagggtcaccacgagcttggcttacttgtctcatccttcccttgcctggtatcattttctcagttctcccaaaagccatgtcccggcccttgctcatcaccttcaccccagccactgaccccagcgacctctggaaggatgggcagcagcagccacagcccgagaagccagagtccaccctggatggggctgcagccctagctttctatgaggccctgattggggatgagagcagcgctcctgactcccagagatctcagactgaacctgccagagaaagaaagagaaagaaaagaagaataatgaaggcaccagcagcagaagcagtggcagaaggagcatcaggaagacatggacaagggagatcccttgaggctgaggataagatgactcaccggatactgagggcagcccaggagggggacctgccagaacttaggagactgctggaaccgcatgaggcaggaggagctggggggaatatcaacgcccgggatgccttctggtggaccccactgatgtgtgctgctcga

SEQ ID NO: 344443 - DNA, 802 bp, Artificial Sequence
  derived and/or modified sequence
cttaggctctaagtgtgaccttcgaaccctggtcagagtaatgaatggcgccattttgcggtacggaagctacacagcaacacgtataggagactctccccgagatcttctagggagtgacccatctatttttgtttgggaagaggaaactccgaaatgggatcgcggaagacttaaagggccaggctgatttttttttcctactgcaggtctctgaggctgtggttgctacagggtcaccacgagcttggcttacttgtctcatccttcccttgcctggtatcattttctcagttctcccaaaagccatgtcccggcccttgctcatcaccttcaccccagccactgaccccagcgacctctggaaggatgggcagcagcagccacagcccgagaagccagagtccaccctggatggggctgcagccctagctttctatgaggccctgattggggatgagagcagcgctcctgactcccagagatctcagactgaacctgccagagaaagaaagagaaagaaaagaagaataatgaaggcaccagcagcagaagcagtggcagaaggagcatcaggaagacatggacaagggagatcccttgaggctgaggataagatgactcaccggatactgagggcagcccaggagggggacctgccagaacttaggagactgctggaaccgcatgaggcaggaggagctggggggaatatcaacgcccgggatgccttctggtggaccccactgatgtgtgctgctcgagcgggccagggggcagctgtgagctatctcctgggccg

SEQ ID NO: 344444 - DNA, 627 bp, Artificial Sequence
  derived and/or modified sequence
cctgggcgcgcggagctttgctcgtttactattgaaaaagttccagcgcgggaaactgaacccggagctttgcgcacgcccgagccctcaagtaataatggcgccattttgcggtacggaagctacacagcaacacgtataggagactctccccgagatcttctagggagtgacccatctatttttgtttgggaagaggaaactccgaaatgggatcgcggaagacttaaagggccaggctgatttttttttcctactggtctctgaggctgtggttgctacagggtcaccacgagcttggcttacttgtctcatccttcccttgcctggtatcattttctcagttctcccaaaagccatgtcccggcccttgctcatcaccttcaccccagccactgaccccagcgacctctggaaggatgggcagcagcagccacagcccgagaagccagagtccaccctggatggggctgcagccctagctttctatgaggccctgattggggatgagagcagcgctcctgactcccagagatctcagactgaacctgccagagaaagaaagagaaagaaaagaagaataatgaaggcaccagcagcagaagcagtggcagaaggagcatcagg

SEQ ID NO: 344445 - DNA, 751 bp, Artificial Sequence
  derived and/or modified sequence
gggcaatacagttttgtgctcactgggtgaagaggctgacttagggcggggaaaggagggagccaggctggatctctttccgcagctctcctcacgttcccctctagtcccggcgaggcgctgctgcccaggggactggcctatcctcggccaatccgctgggtccttattgcctgttgggcccctagtgcgaatcagtcccgccagagacccttgacgggcatactgtttcctccgggctcctgcctcatgaggggagaggaagaggaaactccgaaatgggatcgcggaagacttaaagggccaggctgatttttttttcctactgcaggtctctgaggctgtggttgctacagggtcaccacgagcttggcttacttgtctcatccttcccttgcctggtatcattttctcagttctcccaaaagccatgtcccggcccttgctcatcaccttcaccccagccactgaccccagcgacctctggaaggatgggcagcagcagccacagcccgagaagccagagtccaccctggatggggctgcagccctagctttctatgaggccctgattggggatgagagcagcgctcctgactcccagagatctcagactgaacctgccagagaaagaaagagaaagaaaagaagaataatgaaggcaccagcagcagaagcagtggcagaaggagcatcaggaagacatggacaagggagatcccttgaggctgaggataagatgactcaccgg

SEQ ID NO: 344446 - DNA, 986 bp, Artificial Sequence
  derived and/or modified sequence
gacttagggcggggaaaggagggagccaggctggatctctttccgcagctctcctcacgttcccctctagtcccggcgaggcgctgctgcccaggggactggcctatcctcggccaatccgctgggtccttattgcctgttgggcccctagtgcgaatcagtcccgccagagacccttgacgggcatactgtttcctccgggctcctgcctcatgaggggagaggaagaggaaactccgaaatgggatcgcggaagacttaaagggccaggctgatttttttttcctactggtctctgaggctgtggttgctacagggtcaccacgagcttggcttacttgtctcatccttcccttgcctggtatcattttctcagttctcccaaaagccatgtcccggcccttgctcatcaccttcaccccagccactgaccccagcgacctctggaaggatgggcagcagcagccacagcccgagaagccagagtccaccctggatggggctgcagccctagctttctatgaggccctgattggggatgagagcagcgctcctgactcccagagatctcagactgaacctgccagagaaagaaagagaaagaaaagaagaataatgaaggcaccagcagcagaagcagtggcagaaggagcatcaggaagacatggacaagggagatcccttgaggctgaggataagatgactcaccggatactgagggcagcccaggagggggacctgccagaacttaggagactgctggaaccgcatgaggcaggaggagctggggggaatatcaacgcccgggatgccttctggtggaccccactgatgtgtgctgctcgagcgggccagggggcagctgtgagctatctcctgggccgtggggctgcctgggtgggggtctgtgagctgagtggcagggatgcggctcagctcgctgaagaagctggcttccctgaggtagcccgcatggtcagggagag

SEQ ID NO: 344447 - DNA, 1598 bp, Artificial Sequence
  derived and/or modified sequence
cagagacccttgacgggcatactgtttcctccgggctcctgcctcatgaggggagaggtgcggcttggctccaatggcgccattttgcggtacggaagctacacagcaacacgtataggagactctccccgagatcttctagggagtgacccatctatttttgtttgggaagaggaaactccgaaatgggatcgcggaagacttaaagggccaggctgatttttttttcctactgcaggtctctgaggctgtggttgctacagggtcaccacgagcttggcttacttgtctcatccttcccttgcctggtatcattttctcagttctcccaaaagccatgtcccggcccttgctcatcaccttcaccccagccactgaccccagcgacctctggaaggatgggcagcagcagccacagcccgagaagccagagtccaccctggatggggctgcagccctagctttctatgaggccctgattggggatgagagcagcgctcctgactcccagagatctcagactgaacctgccagagaaagaaagagaaagaaaagaagaataatgaaggcaccagcagcagaagcagtggcagaaggagcatcaggaagacatggacaagggagatcccttgaggctgaggataagatgactcaccggatactgagggcagcccaggagggggacctgccagaacttaggagactgctggaaccgcatgaggcaggaggagctggggggaatatcaacgcccgggatgccttctggtggaccccactgatgtgtgctgctcgagcgggccagggggcagctgtgagctatctcctgggccgtggggctgcctgggtgggggtctgtgagctgagtggcagggatgcggctcagctcgctgaagaagctggcttccctgaggtagcccgcatggtcagggagagccatggagagacaaggagcccggaaaaccggtctcctactccctccctccagtactgcgagaactgtgacacccacttccaagattccaaccaccgcacatccactgctcacctgctgtcactgtcgcagggtcctcagcctcccaaccttccacttggggtgcccatctccagcccgggcttcaaactgctgctgagggggggctgggagccaggaatggggctgggaccccggggtgagggccgtgccaatcccatccccactgtcctcaagagggaccaggaaggactaggctacagatcagcaccccagccccgagtgacacatttcccagcttgggatacccgagctgtggctgggagggagagaccccctcgggtggccacactgagctggagggaggagagaaggagggaggagaaagacagggcttgggagcgggatctaaggacttacatgaacctcgagttctgactttggtaaagtctgaccctagtctgctgctgaagtctgaacttgggcctctgacctgggccctttgacttccccttcctgggatctgctcagatgcagatcctgaagtttttggtcaataggctctgtcttcgtgagagacgggctgagagtcagaaataaatcaaccatttgtggtttattcactttt

SEQ ID NO: 344448 - DNA, 1814 bp, Artificial Sequence
  derived and/or modified sequence
ggtatggcgttcggggcccgggagtctgggcaatacagttttgtgctcactgggtgaagaggctgacttagggcggggaaaggagggagccaggctggatctctttccgcagctctcctcacgttcccctctagtcccggcgaggcgctgctgcccaggggactggcctatcctcggccaatccgctgggtccttattgcctgttgggcccctagtgcgaatcagtcccgccagagacccttgacgggcatactgtttcctccgggctcctgcctcatgaggggagagaatggcgccattttgcggtacggaagctacacagcaacacgtataggagactctccccgagatcttctagggagtgacccatctatttttgtttgggaagaggaaactccgaaatgggatcgcggaagacttaaagggccaggctgatttttttttcctactgcaggtctctgaggctgtggttgctacagggtcaccacgagcttggcttacttgtctcatccttcccttgcctggtatcattttctcagttctcccaaaagccatgtcccggcccttgctcatcaccttcaccccagccactgaccccagcgacctctggaaggatgggcagcagcagccacagcccgagaagccagagtccaccctggatggggctgcagccctagctttctatgaggccctgattggggatgagagcagcgctcctgactcccagagatctcagactgaacctgccagagaaagaaagagaaagaaaagaagaataatgaaggcaccagcagcagaagcagtggcagaaggagcatcaggaagacatggacaagggagatcccttgaggctgaggataagatgactcaccggatactgagggcagcccaggagggggacctgccagaacttaggagactgctggaaccgcatgaggcaggaggagctggggggaatatcaacgcccgggatgccttctggtggaccccactgatgtgtgctgctcgagcgggccagggggcagctgtgagctatctcctgggccgtggggctgcctgggtgggggtctgtgagctgagtggcagggatgcggctcagctcgctgaagaagctggcttccctgaggtagcccgcatggtcagggagagccatggagagacaaggagcccggaaaaccggtctcctactccctccctccagtactgcgagaactgtgacacccacttccaagattccaaccaccgcacatccactgctcacctgctgtcactgtcgcagggtcctcagcctcccaaccttccacttggggtgcccatctccagcccgggcttcaaactgctgctgagggggggctgggagccaggaatggggctgggaccccggggtgagggccgtgccaatcccatccccactgtcctcaagagggaccaggaaggactaggctacagatcagcaccccagccccgagtgacacatttcccagcttgggatacccgagctgtggctgggagggagagaccccctcgggtggccacactgagctggagggaggagagaaggagggaggagaaagacagggcttgggagcgggatctaaggacttacatgaacctcgagttctgactttggtaaagtctgaccctagtctgctgctgaagtctgaacttgggcctctgacctgggccctttgacttccccttcctgggatctgctcagatgcagatcctgaagtttttggtcaataggctctgtcttcgtgagagacgggctgagagtcagaaataaatcaaccatttgtggtttattcactttt

SEQ ID NO: 344449 - DNA, 1910 bp, Artificial Sequence
  derived and/or modified sequence
aggcgtgacgttatttcattacacggcttctcggcattccacaggtttccctccgcctcctgagggcctttcctaacccacagagtggattcctggctccagaaaatgggcttggagcgggggccacgttgaggaaggcgaagggcattgtgggggcgttatgtaaaagtaggaccccaaccgacagatcctagtgctcgcgccacctgggcgcgcggagctttgctcgtttactattgaaaaagttccagcgcgggaaactgaacccggagctttgcgcacgcccgagccctcaagtaatgtgggttgtggtttttgttgttgttgtcgccacgcatgcgtcttcgtgccgtgtggctatttgattgtgtcaactcttctgattagaatggcgccattttgcggtacggaagctacacagcaacacgtataggagactctccccgagatcttctagggagtgacccatctatttttgtttgggaagaggaaactccgaaatgggatcgcggaagacttaaagggccaggctgatttttttttcctactggtctctgaggctgtggttgctacagggtcaccacgagcttggcttacttgtctcatccttcccttgcctggtatcattttctcagttctcccaaaagccatgtcccggcccttgctcatcaccttcaccccagccactgaccccagcgacctctggaaggatgggcagcagcagccacagcccgagaagccagagtccaccctggatggggctgcagccctagctttctatgaggccctgattggggatgagagcagcgctcctgactcccagagatctcagactgaacctgccagagaaagaaagagaaagaaaagaagaataatgaaggcaccagcagcagaagcagtggcagaaggagcatcaggaagacatggacaagggagatcccttgaggctgaggataagatgactcaccggatactgagggcagcccaggagggggacctgccagaacttaggagactgctggaaccgcatgaggcaggaggagctggggggaatatcaacgcccgggatgccttctggtggaccccactgatgtgtgctgctcgagcgggccagggggcagctgtgagctatctcctgggccgtggggctgcctgggtgggggtctgtgagctgagtggcagggatgcggctcagctcgctgaagaagctggcttccctgaggtagcccgcatggtcagggagagccatggagagacaaggagcccggaaaaccggtctcctactccctccctccagtactgcgagaactgtgacacccacttccaagattccaaccaccgcacatccactgctcacctgctgtcactgtcgcagggtcctcagcctcccaaccttccacttggggtgcccatctccagcccgggcttcaaactgctgctgagggggggctgggagccaggaatggggctgggaccccggggtgagggccgtgccaatcccatccccactgtcctcaagagggaccaggaaggactaggctacagatcagcaccccagccccgagtgacacatttcccagcttgggatacccgagctgtggctgggagggagagaccccctcgggtggccacactgagctggagggaggagagaaggagggaggagaaagacagggcttgggagcgggatctaaggacttacatgaacctcgagttctgactttggtaaagtctgaccctagtctgctgctgaagtctgaacttgggcctctgacctgggccctttgacttccccttcctgggatctgctcagatgcagatcctgaagtttttggtcaataggctctgtcttcgtgagagacgggctgagagtcagaaataaatcaaccatttgtggtttattcactttt

SEQ ID NO: 344450 - DNA, 1800 bp, Artificial Sequence
  derived and/or modified sequence
cggggcccgggagtctgggcaatacagttttgtgctcactgggtgaagaggctgacttagggcggggaaaggagggagccaggctggatctctttccgcagctctcctcacgttcccctctagtcccggcgaggcgctgctgcccaggggactggcctatcctcggccaatccgctgggtccttattgcctgttgggcccctagtgcgaatcagtcccgccagagacccttgacgggcatactgtttcctccgggctcctgcctcatgaggggagagaatggcgccattttgcggtacggaagctacacagcaacacgtataggagactctccccgagatcttctagggagtgacccatctatttttgtttgggaagaggaaactccgaaatgggatcgcggaagacttaaagggccaggctgatttttttttcctactggtctctgaggctgtggttgctacagggtcaccacgagcttggcttacttgtctcatccttcccttgcctggtatcattttctcagttctcccaaaagccatgtcccggcccttgctcatcaccttcaccccagccactgaccccagcgacctctggaaggatgggcagcagcagccacagcccgagaagccagagtccaccctggatggggctgcagccctagctttctatgaggccctgattggggatgagagcagcgctcctgactcccagagatctcagactgaacctgccagagaaagaaagagaaagaaaagaagaataatgaaggcaccagcagcagaagcagtggcagaaggagcatcaggaagacatggacaagggagatcccttgaggctgaggataagatgactcaccggatactgagggcagcccaggagggggacctgccagaacttaggagactgctggaaccgcatgaggcaggaggagctggggggaatatcaacgcccgggatgccttctggtggaccccactgatgtgtgctgctcgagcgggccagggggcagctgtgagctatctcctgggccgtggggctgcctgggtgggggtctgtgagctgagtggcagggatgcggctcagctcgctgaagaagctggcttccctgaggtagcccgcatggtcagggagagccatggagagacaaggagcccggaaaaccggtctcctactccctccctccagtactgcgagaactgtgacacccacttccaagattccaaccaccgcacatccactgctcacctgctgtcactgtcgcagggtcctcagcctcccaaccttccacttggggtgcccatctccagcccgggcttcaaactgctgctgagggggggctgggagccaggaatggggctgggaccccggggtgagggccgtgccaatcccatccccactgtcctcaagagggaccaggaaggactaggctacagatcagcaccccagccccgagtgacacatttcccagcttgggatacccgagctgtggctgggagggagagaccccctcgggtggccacactgagctggagggaggagagaaggagggaggagaaagacagggcttgggagcgggatctaaggacttacatgaacctcgagttctgactttggtaaagtctgaccctagtctgctgctgaagtctgaacttgggcctctgacctgggccctttgacttccccttcctgggatctgctcagatgcagatcctgaagtttttggtcaataggctctgtcttcgtgagagacgggctgagagtcagaaataaatcaaccatttgtggtttattcactttt

SEQ ID NO: 344451 - DNA, 1071 bp, Artificial Sequence
  derived and/or modified sequence
atgagtagacctttgctaatcacattcacgcctgccactgacccttctgatctgtggaaagacgggcagcagcagccgcagccagagaagccggaaagcacacttgatggggccgcagctcttgcgttctacgaggccctcattggggacgaaagttcggcccctgacagccagaggagtcagactgagcctgcccgtgaacgcaaaagaaaaaaaagaaggattatgaaggctccagcagccgaagcggtggctgaaggagctagtggaaggcatggccaggggaggtctctcgaggccgaagataagatgacgcatagaatcctccgcgcagcgcaggaaggagatctccctgagttacgcaggttgctagaacctcatgaggctggaggggcaggcgggaatattaacgctcgagacgccttctggtggactccattgatgtgcgccgcgcgcgccggtcagggcgcggcagtctcctacctgttagggcggggtgcggcttgggtcggagtatgcgaactgagcggccgtgacgccgcccagctggccgaagaagctggattcccggaagttgcccgaatggtgcgggagagccacggcgagacaaggtcccctgaaaatcgtagtccaaccccctccctgcagtactgcgaaaattgcgacactcacttccaagatagcaaccaccgcacaagcaccgcgcatctgctatctctctctcaggggccccagccacccaacctccccctgggcgtgcctatcagctcccccggtttcaagctgcttctccggggtggatgggagcccggtatgggcctgggaccccggggcgaagggcgggcgaaccccattcccaccgtgttaaaaagggaccaggagggactcggctacagatcagctccacagccacgggtaacccatttccctgcctgggacacgcgcgctgtggccgggcgggagcgaccaccgagagtcgccaccctctcctggcgagaggaacgcagacgagaagaaaaagaccgggcttgggagagggacttgagaacctacatgaacctggagttctag

SEQ ID NO: 344452 - DNA, 1071 bp, Artificial Sequence
  derived and/or modified sequence
atgtcaagacccttgctaattactttcacccctgcaaccgatccctcagatctatggaaagacggtcagcagcagccgcagcctgagaaacccgagagcacgttggatggtgccgctgccctggccttctacgaggctctaatcggtgatgagagctccgctcctgacagccagcgctctcaaactgagccggccagagagcgtaagaggaagaaaaggagaataatgaaggcccctgcagccgaagccgttgccgagggcgccagtggaagacacggccaagggagatccctggaagcagaagacaagatgactcatcgcatccttcgcgccgctcaagaaggggacttgccagagctccggcggttgctggaaccccacgaagccggaggggcgggcggtaacattaacgcccgagatgcattttggtggacaccactgatgtgtgcagcaagggccggccagggtgccgcagtcagctaccttttggggcggggagctgcctgggtgggggtgtgcgaactcagcgggcgggatgctgctcaattggctgaggaggctggcttcccggaggttgcgagaatggtccgtgaatcgcatggcgagacgagatccccagagaaccgcagccccacgcctagcctacagtattgtgaaaactgtgatacccactttcaggactctaatcaccgaactagtaccgcgcacctcctgtcactgtctcaggggccgcagcccccaaatctccccttgggcgttcctatcagttctcccggatttaagctacttctgcgcgggggatgggaacctggcatggggttgggcccacggggtgagggtcgggctaaccccattccaaccgtacttaagcgcgaccaggagggccttggctataggtccgcgccccagccacgggtgactcactttccagcttgggacaccagagccgtcgctggacgagagaggccccccagagtcgcaacactcagctggagggaagagcggcggagagaggagaaggaccgagcctgggagagggacctgcggacatacatgaatttggagttttag

SEQ ID NO: 344453 - DNA, 1071 bp, Artificial Sequence
  derived and/or modified sequence
atgagtagaccactccttattacattcacaccggccacagacccaagtgacctttggaaagacgggcagcagcagccgcagcctgagaaacctgaatccacattagacggcgcggcagcactagccttttacgaggcactgatcggtgatgagagctccgctccagacagccagaggagtcagaccgagccggccagagaaaggaaacggaaaaagcgtaggataatgaaagcccctgccgctgaagctgttgcggagggggcaagcggcaggcatggccagggccgctcactggaagctgaagacaagatgacccacaggatcttacgagcagcccaggaaggcgacctgccagaactgagacgactcctcgagccccacgaagccgggggggcaggcggcaacataaacgcacgcgacgccttctggtggacccccctaatgtgcgccgcccgggctggacagggggctgcggtatcctatctgctcggaaggggggccgcctgggtaggggtgtgtgagcttagcggcagggacgccgctcagctcgcagaggaagccggctttcccgaggtagcccgaatggttcgggagagccatggagaaaccagatctccagaaaaccggagtcccactccctccctccaatattgcgaaaactgtgatacccatttccaagattctaatcaccgcacctccaccgcccacttgttaagcctgagtcagggacctcagccccctaaccttcctctaggcgtgccaataagttccccaggattcaagctccttctcaggggcggctgggagccaggcatgggccttgggccccggggagaagggcgtgctaaccccattccgaccgtgctgaagcgggatcaggagggcttaggataccggagcgccccccaacctcgagtaacccactttcccgcctgggatacaagagcagttgcggggcgggagcgaccaccccgtgttgccacattatcctggcgagaagaaagaagacgagaagagaaggaccgagcatgggaaagagacctccgcacgtatatgaatctcgagttctag

SEQ ID NO: 344454 - DNA, 1071 bp, Artificial Sequence
  derived and/or modified sequence
atgtctcgccctctcttaataacgtttaccccagctacagacccatctgacctttggaaagatggccagcagcagccgcagccagagaagccagagtcaacactcgacggtgccgccgccttggcgttctacgaggccctgattggcgatgaatcctctgcccccgatagccaaaggtcacaaacagagccagctagggaaagaaagaggaagaagcgaagaattatgaaggcccccgccgctgaggccgtggcagaaggggccagcggacgccacggccaagggcgctccctggaggcagaagataagatgacccataggatcctgagagcggcccaggaaggagatctgcccgaattgcgcaggctcctcgaacctcatgaagccggtggagcagggggcaacataaatgccagagacgctttttggtggacccctctaatgtgtgccgcccgcgctggacagggcgctgccgtatcctatctgttaggacgtggcgccgcatgggtaggtgtttgtgaactcagcggtagggatgctgctcaactggctgaagaagcgggttttcctgaagtggcacgtatggtgagagaatcgcacggcgaaactcggtcgcccgagaaccgttctccaactccatccctgcaatattgcgaaaactgcgacacacatttccaagactctaaccataggacatccacagcccacctgttatccttgtcacaggggccccagcctcccaacttacccctcggagttccgatttcttcacccggctttaagttattgctacgcgggggatgggagccggggatgggtttggggcctagaggagagggccgggctaatcctatcccaactgtgcttaaaagggaccaagagggccttggatatcgctccgccccacagccgcgagtgacccacttccctgcatgggacacacgcgccgtcgccggtagggaaagaccaccacgagtggccaccctgagctggagagaagaaaggcgacgtgaagaaaaagatcgtgcgtgggagcgcgacctaaggacctatatgaacctggaattctag

SEQ ID NO: 344455 - DNA, 1071 bp, Artificial Sequence
  derived and/or modified sequence
atgagtcgcccactgctgataacctttacgcccgcaacagacccctcggacctgtggaaggacgggcagcaacagccacagcccgagaaacccgaatccacactggacggtgcagcagcgttggcattctatgaagcccttattggggatgaaagttcagcaccggattcacaaaggtcacagaccgaacctgcaagagaaaggaagcgcaaaaaacgaagaataatgaaagcaccggcagcggaggccgttgcggaaggtgcttccggacgacacggacaggggagatccttggaggccgaagataagatgactcaccggattctaagggccgcccaggaaggcgaccttccagagctcaggaggttgctcgaacctcacgaggcaggaggggctggggggaacatcaacgcgcgggacgcattttggtggacacctctgatgtgtgctgcacgtgcagggcaaggcgctgccgtgtcctatctgctcggcagaggtgctgcctgggtcggcgtgtgcgaattaagcggtcgagatgccgcacaattagctgaggaggcaggtttcccggaagttgccagaatggtcagagagagccatggcgagacgcggtcacctgagaaccgttctccaacaccgtcattacagtactgcgagaactgtgatacacactttcaagattccaaccaccgcacctccaccgcccatcttctgtccctgagtcaggggccgcaacctccaaatctcccactcggagtgccaatttccagccccggtttcaagctgttacttcgagggggatgggaacccgggatggggctgggcccgaggggtgaggggcgcgccaatccgattcccaccgttctgaagagggatcaagagggcttaggctatcgcagtgccccgcagcctcgggtgacacacttcccagcctgggacaccagagcagttgccggacgcgagcggcccccgagagtggcaactctctcctggagagaggagaggaggagggaggaaaaagacagagcctgggaacgggatctgcgcacttatatgaatctggagttttag

SEQ ID NO: 344456 - DNA, 459 bp, Artificial Sequence
  derived and/or modified sequence
atgtccagacctctgctcattacttttaccccggccactgacccgagcgacttgtggaaggatggtcagcaacagccacagcccgagaagcctgaatccaccttggacggagccgccgctctcgccttttacgaggctctgatcggggatgagagctcggcgccagacagtcagagaagccagacagagcctgcccgagaacggaagagaaagaaacgacgtatcatgaaagcccctgcagcagaagcagtcgccgagggggcgtctgggaggcacggacagggacgatctttagaggctgaggataagatgacgcaccgtatcttaagagccgctcaggagggggacctccccgaacttagacggctgctagaacctcatgaggctggaggggctggtggtaacatcaatgctcgggacgccttctggtggacccctctgatgtgtgccgcccgctag

SEQ ID NO: 344457 - DNA, 1071 bp, Artificial Sequence
  derived and/or modified sequence
atgagtcggcccctgcttataaccttcactccagctacagaccccagtgatctctggaaggatgggcagcaacaaccccaacctgagaagcctgagagcacccttgacggcgcggccgcattggctttctatgaagccctgattggcgatgaatcctcggctccggacagccagaggtctcagaccgaaccggcgagggagagaaagcgcaagaagaggagaataatgaaagccccagctgccgaggcggtagctgagggcgcaagcggacgccatggccaggggcgctctctcgaagccgaggataagatgacccacagaattttaagggccgctcaggaaggagatcttcccgagcttagacgcctgctggaaccgcacgaggctggtggcgcgggtgggaatataaatgcacgagacgccttttggtggacgcctctaatgtgcgccgcccgagctggacagggcgctgccgtctcatatctactgggccgcggcgccgcctgggtcggagtctgcgagctgtccgggagggacgccgcccagttagcagaagaagctggattcccggaagtcgcacggatggtcagagaatctcacggggagacaaggtcccctgagaatagaagccctacccccagcctccagtattgtgaaaattgtgatactcactttcaagattcgaaccaccgtacatccaccgcccacctgctcagcttatcacaggggccacagccaccaaacctcccccttggcgtccccatttcgtcgcctgggtttaaattgctgctgcgcggcggctgggaaccggggatgggattggggccccgcggtgaggggcgggccaacccaatcccgaccgtgcttaaacgcgatcaggaaggcctaggttacagatcggctccgcagcctcgagtgacccacttccccgcttgggatactcgcgccgtggcaggccgggaacggcccccccgagttgccacactctcatggcgggaggagcgacggcgcgaagagaaagaccgcgcatgggaaagggaccttcggacttacatgaatcttgaattttag

SEQ ID NO: 344458 - DNA, 498 bp, Artificial Sequence
  derived and/or modified sequence
atgagccgccccctcctcatcacctttactcctgcaaccgacccaagtgacctgtggaaggatggccagcagcaaccccagccagagaagcccgagagtactctcgatggcgcagccgctttggccttttatgaggcattgatcggcgacgagtcatcagcacctgatagtcagcgatctcagaccgagccggcaagggaacgtaagagaaagaagaggcggattatgaaggcccctgctgccgaggccgtagcagaaggcgcaagcggccggcacggccagggacggagcttggaggccgaggacaaaatgactcaccgcatcttaagagcagcccaggagggtgacctgccagaattgcgccgattactcgagccacatgaagctgggggcgcaggcggaaacatcaacgccagagatgcattttggtggacgcctctgatgtgcgccgcgagggccggacagggcgccgctgtatcatacctcctaggtcgctag

SEQ ID NO: 344459 - DNA, 273 bp, Artificial Sequence
  derived and/or modified sequence
atgtccagaccactgctcattacattcacgcccgccacggaccccagcgacttatggaaagacggccagcagcagccccagcctgaaaaacctgaatctaccctggatggcgcagccgcactggcattttacgaggctttaataggggatgagtcatcagcccctgactcccagagatcacagactgaacccgcacgggagaggaagcggaaaaagcggagaatcatgaaagcccctgcggctgaagccgtggctgaaggcgccagcggttag

SEQ ID NO: 344460 - DNA, 324 bp, Artificial Sequence
  derived and/or modified sequence
atgtcccggcctttgttgatcacttttacacctgcgaccgatccatccgacctatggaaggatggacagcagcagccccagcctgaaaaacccgaaagtaccctggatggagctgccgctctggccttttatgaggcactgatcggggacgagtctagtgcgcccgatagccagcgatcccaaaccgaaccagcacgggaaagaaaaagaaagaaaagacggattatgaaggccccagccgctgaagccgtggccgaaggagcctccggcaggcacggacaaggcaggagcttagaagctgaggacaaaatgacgcatcgttag

SEQ ID NO: 344461 - DNA, 498 bp, Artificial Sequence
  derived and/or modified sequence
atgtcacgtccactgctgatcacttttacccccgccactgacccaagtgacctctggaaagacgggcagcagcagccacagcccgagaaacctgagtccactctcgacggtgcagcggctctcgcattctatgaagctttaataggtgatgagtccagcgcccctgactcacaaagatcccagaccgaacccgctagggaaaggaagcgcaaaaagaggcgcatcatgaaggctccagccgcagaagcagtggctgagggcgcctcaggaagacacggtcaggggagatctctggaggccgaggataagatgactcatcggattctgcgggccgcacaagagggtgatctacccgaactccgccgactgcttgagccgcacgaggctggcggtgcgggggggaacatcaacgcacgcgacgctttctggtggacgccattgatgtgtgctgccagggcagggcagggggcggccgtatcctatttgttagggcgctag

SEQ ID NO: 344462 - DNA, 459 bp, Artificial Sequence
  derived and/or modified sequence
atgtcaagaccgctgcttatcactttcacacctgctaccgatccttccgatctgtggaaagacggacagcaacaacctcagcctgaaaaaccagaatcaactcttgatggagctgctgcacttgccttctatgaggccttaatcggcgacgagtcctccgccccggacagtcagagatcacagaccgagccggcccgcgagaggaaacgcaagaaaaggagaataatgaaagctccagcggcggaggcggtcgctgagggcgcatccggcaggcacggacaggggcgctctttggaggccgaggacaaaatgacgcataggatactgcgcgccgcacaagaaggagacctgcctgaactcaggcggctccttgagccacacgaggccgggggcgcggggggaaatatcaatgcaagagatgcgttctggtggacccccttaatgtgcgctgcacggtag

SEQ ID NO: 344463 - DNA, 459 bp, Artificial Sequence
  derived and/or modified sequence
atgtcgcgcccactcttaatcacgttcacaccagcaaccgaccccagcgatctgtggaaggatggccaacagcagccccagccggagaagcctgagtcaaccttagatggtgctgctgccttagccttctatgaggccctgatcggcgacgaaagctctgcacctgatagtcagcgtagtcaaacggagcctgcaagagaaagaaaaagaaagaagagaagaatcatgaaagcacccgctgctgaagccgtggccgaaggcgcctccgggagacatggccagggccggtctctggaagcagaagacaaaatgactcaccgcatcttgcgagccgcccaggaaggcgacctgccagaactacgtcggctcctcgagccccacgaagccggcggggcaggaggcaacattaatgcccgggacgccttctggtggacacccctgatgtgcgcagcaaggtag

SEQ ID NO: 344464 - DNA, 597 bp, Artificial Sequence
  derived and/or modified sequence
atgtccagaccgctgctcattaccttcactccagctactgatcctagtgacctgtggaaggatgggcagcaacagccacagccagaaaaacctgagtctacgctagacggtgccgccgctctagcattttatgaggccttgatcggcgacgagtcctccgcgcctgactcccagcgatcccaaactgaacccgctcgcgagaggaagaggaaaaaacgaaggataatgaaagcaccagccgccgaagccgtggcagaaggagcttctggccgacacggtcagggtagatcccttgaggctgaggataagatgacacaccgcattcttagggccgctcaggaaggcgatctcccagaactgcggcgcctgttagaaccacacgaagccggcggcgccggaggaaacataaatgcaagagatgctttctggtggacaccgcttatgtgcgccgcgcgagcgggacaaggtgcagcggtttcctatctgctcggaaggggggccgcttgggtcggcgtctgcgaactgagcgggcgtgacgctgcgcagctggcagaagaggctggttttcctgaggtggcccggatggttcgcgagtag

SEQ ID NO: 344465 - DNA, 597 bp, Artificial Sequence
  derived and/or modified sequence
atgtcaaggcccctcctcattacattcacacccgcaacagacccttcggacctctggaaggatgggcagcagcagcctcagcctgaaaaacctgagagtaccctggacggagccgctgccctggccttctacgaagcactcattggagacgagtccagcgctccagactcccagcggtctcagacagagccagcaagagaaagaaagcgcaagaagaggcggatcatgaaagcaccagcggccgaggctgtcgctgagggtgcaagcggccgccacggccagggacgatccctcgaagcggaagataagatgacccacagaatcctccgggctgcgcaggagggcgatttgcctgaattgagaaggctcctcgaacctcatgaggccggtggcgctggcgggaacattaatgcacgcgatgccttctggtggacccccctcatgtgtgccgcgcgtgcggggcagggagccgcagtgagctacctcctggggcggggagcagcctgggttggagtgtgtgagcttagtgggcgagatgctgctcaactggctgaggaggctgggtttccagaggtcgcgagaatggtgagagaatag

SEQ ID NO: 344466 - DNA, 1071 bp, Artificial Sequence
  derived and/or modified sequence
atgtctagaccactgctgataacgttcactccagcaacagatccatcggacctgtggaaggatggccagcagcagccccagccggagaaacccgaatccacccttgatggcgctgccgccctcgcgttctacgaggccctcataggcgatgaatcctccgctccggatagccagcgttctcagaccgaacccgcccgcgaacgcaaacgcaagaaacgtagaatcatgaaggcaccggccgccgaggctgtagcggagggggcgtctggtcggcacgggcagggtagaagcctggaggctgaggacaaaatgacgcatcgaatcctccgtgccgcccaggaaggtgacctgcccgagttgcgcaggttgctggagccccacgaagccggaggggccggcggtaacataaatgcgagagacgctttttggtggaccccactgatgtgcgccgctcgggccggccagggcgccgctgtaagctacttactgggaaggggggcagcatgggtaggcgtatgtgagctcagcggcagagacgccgctcaattggccgaggaggcgggctttccagaggtggcccgtatggtcagggagagccatggagagacgaggtctcctgagaatagatcgccaactccatcccttcagtattgcgagaactgcgacacccatttccaagactccaaccatagaacgagcactgcgcacttgttaagcttgtcccagggacctcagccccctaatctgcccctcggcgtacctataagctccccagggttcaagttactccttcggggcggctgggaacctggaatgggcctcggaccacgaggggagggccgggccaatcctatcccgacagtgcttaagagggaccaggaaggtctgggataccgctctgcccctcagcctcgagtcacccacttccccgcgtgggatacacgggctgtggcagggagagagcggccgccccgggtcgccaccctcagctggagagaggagcgccgtagagaggaaaaagatagagcatgggaacgggacttgaggacatatatgaacttagagttctag

SEQ ID NO: 344467 - DNA, 597 bp, Artificial Sequence
  derived and/or modified sequence
atgagtagacccctgctgataaccttcactcctgctacggacccctctgacctgtggaaggatggccagcagcagcctcaacctgaaaagcccgagagtaccctggatggagccgccgccctggctttttacgaggctctgattggtgacgagagttctgcccctgattcacagcgctctcaaactgaaccagcccgcgaaaggaagcgaaagaaacgcagaattatgaaagcccccgcagccgaggctgttgccgaaggcgcctcgggaaggcacggacaggggagatctctggaggcggaagataagatgacccaccgcatcctcagggccgctcaggaaggagacctgcccgaacttagacgtctgctcgagcctcatgaagccggaggggcaggaggcaacatcaatgcccgcgatgctttctggtggacacccctgatgtgcgccgctcgggcagggcagggggctgcagtcagttacctgctgggcagaggggcagcatgggttggggtgtgcgagctgtccgggcgagacgccgcccagcttgccgaggaggctggctttcccgaggtcgccagaatggtgcgcgagtag

SEQ ID NO: 344468 - DNA, 1071 bp, Artificial Sequence
  derived and/or modified sequence
atgagtcggcctttattgattactttcactcctgcaacagacccaagcgatctttggaaagatgggcagcagcaacctcagccagaaaaacctgaaagcacgcttgatggtgctgccgcactagcattttatgaggccctaataggcgatgagtcaagcgcacccgatagccagagaagccaaaccgagcccgcgcgggaacgtaagagaaaaaagaggcgcatcatgaaggcgcctgctgccgaggcagtcgccgagggcgcatccggaaggcatggacagggccgatcactcgaggccgaggacaaaatgacccatcgaatactgcgcgctgcacaggaaggtgacttacccgagctgcgacgacttcttgaaccccatgaggctgggggcgcgggtggaaacattaatgctcgcgacgctttctggtggacccccctcatgtgtgcagccagggccggccagggcgccgcggtgagctacctactggggagaggggccgcgtgggtgggcgtctgcgagctctcgggaagagacgctgctcagctggcggaggaggcaggattcccggaggtcgccagaatggtccgtgagtctcacggagagacacggtctccagagaacaggagtccaacgcctagcctgcagtactgtgagaattgtgacacccacttccaggatagtaaccatcgaaccagcactgcccatcttctttctctcagtcaaggcccccaacctcccaatctgccactcggcgtgcccatcagcagccctggctttaaacttctgctgagaggtggttgggagcctggaatgggtctgggccccaggggtgagggcagagccaacccaattcccacagtgctgaagagggaccaagaaggcctgggctatcggagcgcaccccagccgcgcgtgacgcacttccccgcttgggatacccgggctgtcgccggtcgcgagcgccctccacgggtggctactctttcctggagagaggaaagacgacgagaagagaaggatagagcctgggagcgagacctgcgcacttatatgaatctggagttttag

SEQ ID NO: 344469 - DNA, 1071 bp, Artificial Sequence
  derived and/or modified sequence
atgtcgagacctctcttgattacctttacgcccgcgacagatccatcggacctgtggaaggatggccagcaacaaccacagcctgagaagccagagtcgaccctggatggggctgctgcactagcattttacgaggcactcatcggcgatgagagctcagctccggactcacagaggagtcagacggagccagcccgcgaacggaaaaggaagaagagaaggattatgaaggcaccggctgccgaggcagtggccgagggtgcttcaggacgccatggacagggaaggtccctcgaggctgaggacaaaatgacccatcggattctacgggctgcccaggaaggagaccttcccgaacttaggcgcctcttggagccacacgaagctgggggggctgggggcaatatcaacgcacgggacgcattttggtggactccactgatgtgcgcagccagggcgggccagggagcagccgtcagctatctgttgggacgtggtgccgcatgggtcggggtgtgtgagttgtccggcagggacgctgctcagcttgctgaagaagctgggttcccggaagtggctaggatggtccgtgagagccacggcgaaaccagaagccctgagaaccgatctcctacccctagcttacagtactgcgaaaattgtgatacacactttcaggatagtaaccaccgaacatctacagcacatcttctgtctctttctcaggggccccagccccctaaccttcctctaggcgtgcccatctcgagccccggattcaaattgctcttaagaggcgggtgggaaccagggatggggctgggccctcggggggaaggtagggctaatcctatccctactgtcctgaagcgcgatcaggaggggctgggttatcgttcagccccccaaccaagggtgacccacttcccagcatgggacacaagggccgttgccggccgcgagcgcccaccaagggtggctaccctgagttggagagaggaacggagacgcgaagaaaaagatagagcttgggagagagaccttaggacatacatgaacttggaattctag

SEQ ID NO: 344470 - DNA, 1071 bp, Artificial Sequence
  derived and/or modified sequence
atgagccgtccattgttaattacctttacgcccgcgaccgatccttcagatctttggaaggacggacaacaacagccccagcctgaaaagccggaaagcaccctcgacggagctgcagctcttgctttctatgaggcgctgattggcgacgaatctagcgcacctgactcgcaacgcagtcagactgagccagcaagagaacgtaaacgcaagaagcgccgaatcatgaaggcccctgctgccgaggccgtagctgagggcgcatcaggccgacacggccaaggtcgcagcttggaagctgaggataagatgacccatcgcatcctgcgcgccgcccaggagggagatctccccgagctgcgtagactgctggagccccacgaggctgggggggcagggggaaatatcaacgcacgcgatgccttttggtggactcccttgatgtgcgctgcccgtgctggccagggcgctgcagtctcttacctgttaggacggggcgctgcatgggttggtgtctgcgaattgtccggccgggatgctgctcagcttgccgaggaagcagggttcccagaagtagcccggatggtgcgagagtcccatggcgagactaggtcacccgagaacagaagccctaccccttcgcttcagtactgtgagaactgcgatacacacttccaagactccaaccaccgtacctcaaccgcacatctgctgagtttgagccagggcccccagccccccaacctgcctctcggagttcctatttcgagtccgggttttaaactgctcctgagaggagggtgggagcctgggatggggctcggtcctagaggcgagggccgtgccaaccccattcccacagtcctgaagagagatcaggaaggcctcgggtataggagcgctcctcagccccgtgttacccacttccccgcatgggacacccgcgcagtggcggggcgcgaacggcccccccgggtagccactttaagctggcgtgaggagaggaggcgggaagagaaagacagggcatgggagcgagacctcagaacgtacatgaacctcgaattctag

SEQ ID NO: 344471 - DNA, 273 bp, Artificial Sequence
  derived and/or modified sequence
atgtcccggcctcttctcatcaccttcactcctgcaactgatcctagcgacctgtggaaggatgggcagcagcaaccccagcctgaaaagccagaatccaccttggatggcgccgccgcactagcattctatgaggccttaattggggatgagtcctctgcccccgactcacagcgctcacagactgagcctgctagagagcgcaaaaggaaaaaaaggagaatcatgaaggctcctgcagctgaggccgttgctgaaggagctagtggttag

SEQ ID NO: 344472 - DNA, 273 bp, Artificial Sequence
  derived and/or modified sequence
atgtcacgaccacttctcatcaccttcacccctgctacggatccatctgatctgtggaaggacggccaacagcagccacagcccgaaaagcctgagtctaccctggacggagcagctgctcttgctttctacgaggcgttaattggcgacgagagcagcgcgccagactctcaaaggagccaaactgagcctgcccgggagaggaaacgcaaaaaaaggagaattatgaaagcaccagccgcggaagcagttgccgagggtgcttcggggtag

SEQ ID NO: 344473 - DNA, 324 bp, Artificial Sequence
  derived and/or modified sequence
atgtcgcggccactgctcattactttcacccccgctacagatccatccgatctgtggaaagacgggcagcagcaaccacagccggagaagcctgagtcaaccctcgacggcgccgccgcattggccttctacgaagcactgataggggacgaaagctctgccccggactcacaacggtcccagacagaacccgcacgcgaaaggaagagaaagaaaaggcggattatgaaggctcccgctgcggaggcggtggcagagggagcctcaggccgacacgggcaaggaaggagcttggaggccgaagacaagatgacgcaccgttag

SEQ ID NO: 344474 - DNA, 324 bp, Artificial Sequence
  derived and/or modified sequence
atgagccgtcctctgttgattacctttacacccgccacggatccctccgatttgtggaaggatggccagcagcagcctcaacctgaaaagcccgagagcactctcgatggagccgctgctctggcgttttatgaggccctgatcggcgatgagtctagcgccccggattctcagagatctcagacggagccagcacgagagcgtaagcgcaaaaaaaggcggatcatgaaggcccctgcagccgaggcggtggccgaaggcgctagcggaaggcacgggcagggtaggtcgctggaagctgaggataaaatgacacacaggtag

SEQ ID NO: 344475 - DNA, 1071 bp, Artificial Sequence
  derived and/or modified sequence
atgtctaggcctctgctgattacctttaccccagcaaccgatccttccgacttgtggaaagatggccagcagcagccacaaccagagaaacccgagtccactttagacggagccgccgctctcgccttctatgaggctctgatcggagacgaatccagtgcacccgattcccagcgatcccagactgaaccggcacgcgagaggaaaaggaagaagaggaggataatgaaagcccccgctgccgaggccgtggccgagggagcttccggaagacacgggcagggccgcagcttggaagccgaggataaaatgactcatcggatcctgcgtgccgcacaggagggggacctccccgaactgcggcggttgctcgagccacatgaggccgggggcgcagggggaaacataaatgctagggatgcattctggtggactccactcatgtgcgctgcgagagccgggcagggagcagcggtgagctatctacttggaaggggcgcagcctgggtgggcgtctgcgaacttagcggacgagacgccgcccagctggccgaagaagccggctttcctgaagtggccaggatggtgagagaaagccatggagaaacacggagtcctgaaaacagatcccctactccatcattgcagtactgcgagaactgtgatacccactttcaggactcaaaccaccgcaccagcactgcacacctgttaagcttgtctcagggcccacagccccccaatctgcctcttggcgtgcctatatcctcaccggggttcaaactactgcttcggggcggttgggagcctggtatgggtttggggccccgcggcgagggacgggccaatcccatccccaccgtactcaaacgcgatcaggagggactggggtaccggtctgccccgcaaccccgggtgacacactttccagcttgggacacccgggccgtggccgggagggaaaggcctcctcgagttgctactttgagttggcgagaggaacggcgaagggaagaaaaagatagagcctgggagcgggatcttaggacttacatgaacttggagttctag

SEQ ID NO: 344476 - DNA, 498 bp, Artificial Sequence
  derived and/or modified sequence
atgagtaggccgctgctcataaccttcacccccgctacagacccaagtgacctgtggaaggacggccagcagcagccacagcctgagaagccagagtcaaccctggatggcgcggctgctctggcattttatgaagccctgatcggcgatgagtctagtgctcccgactctcagaggtcacagacagaacctgccagagagaggaagcgaaagaaaagacgcattatgaaagctcctgccgcagaggcggttgccgaaggcgccagcggccgacatggacagggaaggtctttggaggctgaggacaagatgacccaccgaattctgagagcagcccaagaaggagacctgccagagctgagacgtctcctggagccccacgaagccggaggggcaggaggtaatatcaatgccagagatgctttttggtggactcccctgatgtgcgcggctcgggccgggcagggagccgccgtgagctatctgttgggcaggtag

SEQ ID NO: 344477 - DNA, 1071 bp, Artificial Sequence
  derived and/or modified sequence
atgtcgcgccctctgctcatcacttttacgcctgctaccgatccttccgatctgtggaaggacggtcagcagcaaccacagccagaaaaaccggaatcaactctcgatggagccgctgccttggccttctatgaggccctgataggtgacgagagctctgcacccgatagccaaagaagccagaccgagcctgcaagagaacggaagcgaaagaaacgccgtatcatgaaggcgccagccgctgaggctgtggccgaaggggcaagtggccgtcatggacaggggcgttctctggaggctgaagacaagatgacccaccgcatcttgagggctgctcaggagggggatctacccgagctgcgacggctcctggaaccccatgaggctggcggcgctggcgggaacatcaacgcacgcgacgcattctggtggacacctttgatgtgcgcagcaagggccgggcaaggcgcagccgtctcatatctcctcggccgcggagcagcctgggtgggggtctgtgaacttagcggtcgggatgctgcgcagttggcagaggaggcaggtttccctgaggtggctcgtatggtgcgcgagtcacacggtgagacccgctctccagaaaaccgctcccccacaccatcactccagtactgtgaaaactgtgatacgcactttcaggactccaaccaccggacttccacggctcatcttttatccctgagccagggcccccagcctcctaacctccccctcggcgttccaatctcctcacccggatttaaactgctgttgcggggcggatgggagcctggcatggggctcggccctcgcggggaaggccgggccaaccctattccgaccgtactgaaacgagatcaggaggggctgggttacagaagcgctccacagccacgtgtgactcatttccctgcttgggacacgcgagcggtggctggacgagaaagaccccctagagtggccactctgtcatggcgcgaagaacgcaggcgggaggaaaaggatcgcgcctgggaaagggatcttcggacatacatgaacctcgagttctag

SEQ ID NO: 344478 - DNA, 1071 bp, Artificial Sequence
  derived and/or modified sequence
atgagtcgcccactactcattacttttactccagccaccgacccctcagatctctggaaagacgggcagcagcaaccgcaacccgaaaagcctgagtcaacgttggatggtgcagccgcccttgctttttacgaagcactcattggggatgagtcctccgcccccgattcccagaggtcacaaacagagcctgctagggaaagaaagagaaagaaacgtcgaattatgaaggcacccgccgcggaagcagtcgctgagggggccagcggacgccacggacagggcagaagccttgaggctgaggataagatgacacaccggatcctccgcgctgcccaagagggagacctgccagagctgcgccgactgctcgagccacatgaggcaggaggagccggcgggaatattaacgcccgggacgccttttggtggacccctctgatgtgcgccgcacgagccggccagggcgccgccgtgtcttacctgctggggcgcggtgccgcctgggtgggggtgtgtgaactcagcggacgcgacgctgctcagctggccgaagaagcagggttcccggaggttgcacgaatggtccgtgaaagccacggagagactaggtcaccagagaatcgctcccctactccttcgctccagtactgtgaaaattgtgacactcactttcaggattccaaccatagaaccagtacagcccatttgctgtctctaagccagggcccccagcctccaaacctgccgctcggagttccaattagttcacctggttttaaactgttactacgggggggatgggagccgggcatgggacttgggcctagaggggagggcagggctaatccaatcccaacagtcttgaagagagaccaggaggggctggggtacagatcagcaccacaacccagagtgacacactttccagcgtgggacacgagggccgtggctggacgcgagcgcccaccacgcgttgccaccttaagctggagagaagagcgcagacgagaggaaaaagaccgagcctgggagagagacttgcgaacttacatgaatctcgaattttag

SEQ ID NO: 344479 - DNA, 1071 bp, Artificial Sequence
  derived and/or modified sequence
atgtctcgacctttactgatcacctttacgcccgctaccgacccttccgacctatggaaagatggtcagcaacagcctcaacctgaaaaaccggaatccacactcgatggcgccgccgcgttagccttttatgaggccttaatcggagatgaatcttctgcacccgacagtcaaaggtcccaaactgagcctgcccgtgagcgaaaaaggaaaaagcggcggataatgaaagcacccgccgcagaggctgttgctgagggcgcatctggaagacatggccaaggtcggagtctcgaggcagaagacaagatgacacaccgcattctcagagctgctcaggaaggcgatctccccgagttaaggagactgctggagccccacgaggccggaggagcagggggcaatattaatgctagggacgccttctggtggacgcctctgatgtgtgctgcccgggcgggccaaggggccgccgtatcctatttgctaggtagaggggccgcctgggtgggcgtgtgtgagctgtccggcagagacgccgctcaattggcggaagaggcaggattccccgaagtggcccggatggtccgggaatcccacggggagacacgcagccccgaaaaccggagtccgacgcctagcctccagtactgcgagaactgtgatacccattttcaagacagtaatcatcggaccagtacagctcacttgttgtccctcagtcaaggacctcagccaccgaacttgccactgggggtgcccatttcttctcctggctttaagctgttactgcggggcggttgggaacccggcatgggactgggaccccgcggcgagggccgggccaacccgattccaacagtattgaaacgggaccaggaaggcctcgggtatcgatctgccccccagcccagagtgacccactttcccgcttgggatacccgggccgtagcagggagagaaagacctcccagagttgcaaccttatcctggcgcgaagaacgaagaagagaggagaaggatagagcctgggagagagaccttagaacctacatgaaccttgagttctag

SEQ ID NO: 344480 - DNA, 1071 bp, Artificial Sequence
  derived and/or modified sequence
atgagccggcccctgctgatcaccttcaccccagccacagaccccagcgacctgtggaaggatggccagcagcagccccagcctgagaagccagagagcaccctggatggagctgctgccctggccttctatgaggccctgattggagatgagagcagcgccccagacagccagaggagccagacagagcccgcccgggagaggaagaggaagaagaggcgcatcatgaaggccccagctgctgaggccgtggccgagggcgccagcggccgccacggccagggccgcagcctggaggccgaggacaagatgacccaccgcatcctgcgggccgcccaggagggggacctgcctgagctgcggcggctgctggagccccatgaagctggaggagctgggggcaacatcaatgccagagatgccttctggtggacccccctgatgtgtgccgcccgggccggccagggcgctgctgtgtcctacctgctgggcagaggagctgcctgggtgggcgtgtgtgagctgagcggcagagatgctgcccagctggccgaggaggccggcttccctgaggtggccaggatggtgcgggagagccacggggagaccaggagcccagaaaatagaagccccacccccagcctgcagtactgtgagaactgtgacacccacttccaggacagcaaccacaggaccagcacagcccacctgctgagcctgagccagggcccccagccccccaacctgcccctgggcgtgcccatcagcagccctggcttcaagctgctgctgcggggcggctgggagcccggcatgggcctgggccccagaggagagggccgggccaaccccatccccaccgtgctgaagagggaccaggagggcctgggctaccgcagcgccccccagccccgggtgacccacttccctgcctgggacaccagggctgtggccggccgggagaggcctccccgggtggccaccctgtcctggagggaggagcggcggcgggaggagaaggaccgggcctgggagcgggacctgcggacctacatgaacctggagttctag

SEQ ID NO: 344481 - DNA, 459 bp, Artificial Sequence
  derived and/or modified sequence
atgagccggcccctgctgatcaccttcaccccagccacagaccccagcgacctgtggaaggatggccagcagcagccccagcctgagaagccagagagcaccctggatggagctgctgccctggccttctatgaggccctgattggagatgagagcagcgccccagacagccagaggagccagacagagcccgcccgggagaggaagaggaagaagaggcgcatcatgaaggccccagctgctgaggccgtggccgagggcgccagcggccgccacggccagggccgcagcctggaggccgaggacaagatgacccaccgcatcctgcgggccgcccaggagggggacctgcctgagctgcggcggctgctggagccccatgaagctggaggagctgggggcaacatcaatgccagagatgccttctggtggacccccctgatgtgtgccgccaggtag

SEQ ID NO: 344482 - DNA, 498 bp, Artificial Sequence
  derived and/or modified sequence
atgagccggcccctgctgatcaccttcaccccagccacagaccccagcgacctgtggaaggatggccagcagcagccccagcctgagaagccagagagcaccctggatggagctgctgccctggccttctatgaggccctgattggagatgagagcagcgccccagacagccagaggagccagacagagcccgcccgggagaggaagaggaagaagaggcgcatcatgaaggccccagctgctgaggccgtggccgagggcgccagcggccgccacggccagggccgcagcctggaggccgaggacaagatgacccaccgcatcctgcgggccgcccaggagggggacctgcctgagctgcggcggctgctggagccccatgaagctggaggagctgggggcaacatcaatgccagagatgccttctggtggacccccctgatgtgtgccgcccgggccggccagggcgctgctgtgtcctacctgctgggccgctag

SEQ ID NO: 344483 - DNA, 273 bp, Artificial Sequence
  derived and/or modified sequence
atgagccggcccctgctgatcaccttcaccccagccacagaccccagcgacctgtggaaggatggccagcagcagccccagcctgagaagccagagagcaccctggatggagctgctgccctggccttctatgaggccctgattggagatgagagcagcgccccagacagccagaggagccagacagagcccgcccgggagaggaagaggaagaagaggcgcatcatgaaggccccagctgctgaggccgtggccgagggcgccagcggctag

SEQ ID NO: 344484 - DNA, 324 bp, Artificial Sequence
  derived and/or modified sequence
atgagccggcccctgctgatcaccttcaccccagccacagaccccagcgacctgtggaaggatggccagcagcagccccagcctgagaagccagagagcaccctggatggagctgctgccctggccttctatgaggccctgattggagatgagagcagcgccccagacagccagaggagccagacagagcccgcccgggagaggaagaggaagaagaggcgcatcatgaaggccccagctgctgaggccgtggccgagggcgccagcggccgccacggccagggccgcagcctggaggccgaggacaagatgacccacaggtag

SEQ ID NO: 344485 - DNA, 597 bp, Artificial Sequence
  derived and/or modified sequence
atgagccggcccctgctgatcaccttcaccccagccacagaccccagcgacctgtggaaggatggccagcagcagccccagcctgagaagccagagagcaccctggatggagctgctgccctggccttctatgaggccctgattggagatgagagcagcgccccagacagccagaggagccagacagagcccgcccgggagaggaagaggaagaagaggcgcatcatgaaggccccagctgctgaggccgtggccgagggcgccagcggccgccacggccagggccgcagcctggaggccgaggacaagatgacccaccgcatcctgcgggccgcccaggagggggacctgcctgagctgcggcggctgctggagccccatgaagctggaggagctgggggcaacatcaatgccagagatgccttctggtggacccccctgatgtgtgccgcccgggccggccagggcgctgctgtgtcctacctgctgggcagaggagctgcctgggtgggcgtgtgtgagctgagcggcagagatgctgcccagctggccgaggaggccggcttccctgaggtggccaggatggtgcgggagtag

SEQ ID NO: 344486 - DNA, 1071 bp, Artificial Sequence
  derived and/or modified sequence
atgagccggcccctgctgatcaccttcacccccgccaccgaccccagcgacttatggaaggatggccagcagcagccccagcccgagaagcctgagtctaccctcgatggtgcagccgccctggctttctatgaagctcttatcggggacgaatcctccgcccccgattctcaacgatctcaaaccgaacccgctagggagaggaaacgaaaaaaacggcggatcatgaaggccccagctgcagaagccgtggctgagggcgctagtggtcgacacgggcaagggcgatccctcgaggcggaagataaaatgacccacagaatactcagggctgcgcaggaaggcgacctccctgagctgcgaaggctgctcgagccacatgaagccggcggtgcaggcggcaacattaacgccagggacgccttttggtggactcccctgatgtgcgctgcgcgtgctgggcagggcgccgcagtgtcctatttactgggccgtggcgctgcctgggtcggcgtctgcgaactgtccggaagggacgctgctcagttagcagaagaagctggtttccccgaggtcgctcggatggtccgagaaagtcatggagagacccggtcccccgagaataggtcccctacacccagccttcagtattgtgagaactgtgacacccatttccaagattctaatcatcgcacgagtaccgcccatctgttgtcacttagccaaggacctcagccacctaacctcccgttgggtgtgccaatctcatctccaggtttcaagctcctcttaaggggaggatgggagcctggcatgggcctgggaccgcgtggggagggacgagcaaatcccatcccgacagtgctcaaaagagaccaagagggtcttggctatcggtctgcgccccaaccacgtgttacacactttcctgcctgggacacacgggccgtggccggaagagagaggccccctagggtggccacactgtcctggagagaggagaggcgtagagaggaaaaggaccgagcctgggagcgggacctccggacctatatgaaccttgaattttag

SEQ ID NO: 344487 - DNA, 1071 bp, Artificial Sequence
  derived and/or modified sequence
atgagccggcccctgctgatcaccttcacccccgccaccgacccctccgacctgtggaaggatggccagcagcagcctcagccagagaaacccgagagcacactggatggcgcagcagcgctcgctttttatgaagccttgatcggggacgagtcatccgctccagattcacagcgctcccagacagaaccagctagagagcgcaaaagaaaaaagaggagaattatgaaagcaccagcagctgaagccgtggcagaaggagccagcggccgccacggtcaggggagatctctggaggccgaagataaaatgacccataggatcctacgggccgcacaggagggggatctgcccgagctccggcgcctccttgagccccacgaggccggtggtgcaggagggaacatcaatgcccgtgatgccttctggtggacccctcttatgtgcgccgcgagggccggccaaggggccgccgtgtcctacctcttgggccggggagccgcatgggtaggagtatgtgagctgagcgggcgcgacgcggcgcagctggcagaggaggccggattcccagaggttgctcgcatggttcgagagtcacacggagagactagatctcccgaaaatagaagtcctacaccttctcttcaatactgtgagaattgtgacactcattttcaggactccaatcaccggacttctaccgcacacctcttgtcactgtcacagggaccccaacctccaaatctcccactgggtgtgcctatctcttctccagggtttaaactcctgctccgcggcggatgggaaccagggatggggctaggccccaggggagaaggtagggccaacccgataccaaccgttctgaaaagggatcaggaggggttgggctaccggtctgctcctcagccacgtgtgacccactttcctgcctgggacactcgtgctgttgctggtcgggagaggccaccacgtgtcgccacactgtcatggcgggaggagcggcggagagaagagaaagaccgcgcttgggaacgagacctccgaacctatatgaacttagagttttag

SEQ ID NO: 344488 - DNA, 1071 bp, Artificial Sequence
  derived and/or modified sequence
atgagccggcccctgctgatcaccttcacccccgccaccgacccctcagatctctggaaggacggccagcagcagcctcagcccgaaaagccagaaagcacactggacggtgcggctgcgctggcattctatgaggcgctaataggagacgaatcgtccgcacccgacagtcagaggtcccagactgaaccagccagagagaggaagcggaagaaacggagaattatgaaggctcccgccgccgaagccgttgctgaaggagcaagcggacgccatggccaggggcggtccctagaggccgaggataaaatgactcataggatattacgcgctgcccaggaaggggacctgccagagctgaggcggcttctggagccgcacgaggccggaggagcaggcggtaacattaacgctagggatgccttttggtggacgcccctgatgtgtgcggctagagctggccagggagcagccgtttcttacctgctgggccgtggcgctgcatgggtgggggtatgtgagctttctggccgcgatgccgcacaactggccgaagaggccggatttccggaagttgcaaggatggtacgagagtcccatggcgaaacgcgatccccagagaataggtctccaacacccagcctgcagtattgcgagaattgcgacacccattttcaagatagtaaccacaggaccagtacagcccaccttttgtcgttgagccaagggccacaaccccccaaccttccccttggtgtgcccatatccagccccggtttcaagcttctgttgcgcggcggctgggaacccggcatgggattaggaccaagaggcgaggggagggccaatcctatacccaccgtgctgaagagagaccaggaggggttgggctatcggagtgcgccccaaccgcgggtcacccattttccagcctgggacactcgcgctgttgccgggcgggagcggcccccaagagtcgccaccctgtcatggcgggaggagaggcgaagagaggagaaggatcgcgcttgggaacgggaccttcgaacctacatgaatctcgaattctag

SEQ ID NO: 344489 - DNA, 1071 bp, Artificial Sequence
  derived and/or modified sequence
atgagccggcccctgctgatcaccttcacccccgccaccgaccccagcgacctgtggaaggacggccaacagcagccccagcccgagaagccagaaagcaccctggacggagcagctgcccttgccttttatgaagccttaattggcgacgagagcagtgctccagacagccagcgatctcagaccgagccggcaagagaaaggaaacgaaaaaaacgcaggattatgaaggctcctgccgccgaagccgtggcagagggtgcttctgggcgccacggacaggggcggagcctggaggcagaggataaaatgacacacagaattctaagggctgctcaggagggtgaccttcccgagctgcgcagactgctggagcctcacgaggccggcggcgctggcggcaatatcaatgcccgagatgcgttctggtggacccccttgatgtgcgctgcccgcgcaggccagggcgctgccgtctcatatcttttgggaaggggggcagcctgggtgggagtgtgtgagctatctgggcgcgatgccgcacagctggccgaagaagcaggttttccggaagtggcgcggatggtgcgggaatcccacggtgagactcggtccccagagaataggtcaccaactcctagtcttcaatattgtgaaaattgcgatacacattttcaggatagtaatcatagaaccagtacagcccacctcctgtccctgagtcaggggccacaacctccgaatctccccctcggcgtaccgatctctagtccgggatttaaactcctgttaaggggaggttgggagcccgggatgggcctaggtccgcgaggagaggggcgagccaaccctatccctactgtactcaaacgcgaccaggaaggactcggttatcgttcagctccacaacctagagtgactcactttccagcgtgggatactagagccgtagctggacgtgaacgacctcctcgggtggccacactgtcttggagggaggagaggagacgggaggagaaggacagggcctgggaaagagaccttcggacatatatgaacctggagttctag

SEQ ID NO: 344490 - DNA, 1071 bp, Artificial Sequence
  derived and/or modified sequence
atgagccggcccctgctgatcaccttcacccccgccaccgaccccagtgacctatggaaagacggccaacagcagcctcagcctgaaaagccagagtctactctggatggcgctgccgcactggcattctacgaggcgctgatcggtgatgagtcatctgccccagactcccaacgctcccagacggagcccgcaagggaaaggaagcggaaaaaaaggaggattatgaaggccccagctgctgaagccgtcgctgagggcgccagcggtcggcacgggcagggccgtagtcttgaagcggaggacaagatgacacatagaatcctgagggctgcccaagagggcgatctccccgaactgcggcgtttattggagcctcatgaagctgggggggccggtggcaatattaacgctagggatgccttttggtggacaccactaatgtgcgctgctagagccggccagggagctgcggtcagctacctccttggccgcggagcagcatgggtgggcgtgtgcgagctgagcggcagagatgcggcccagctggccgaagaagcaggttttcctgaggtggcgagaatggtgcgggagtctcacggcgagacgaggtctcccgagaaccggagtccaactcctagtctgcagtactgcgaaaactgcgatacccatttccaagacagcaatcaccggacaagcacagcccatttactgagtctgagtcagggtccacaaccacccaaccttcccctgggagtacctataagctcacccgggttcaaactgcttttaagaggaggttgggagccgggcatgggccttgggccacggggagagggtcgcgctaatcccatccccactgtgctgaaacgtgatcaggagggactgggctacaggtctgccccccaaccaagagttacgcacttccccgcttgggatacgcgggctgtcgccgggagagagcgcccacctagggtggccaccctgtcctggcgcgaggaacgccgcagagaggaaaaagacagagcctgggaacgagacttgcggacttatatgaaccttgagttctag

SEQ ID NO: 344491 - DNA, 1071 bp, Artificial Sequence
  derived and/or modified sequence
atgagccggcccctgctgatcaccttcacccccgccaccgacccctcagacctctggaaggacggtcagcaacaaccccaacctgagaaacccgagagcacattggacggagccgctgccctggccttctacgaggcactaattggtgatgagagcagcgcacccgatagccaacggagtcagaccgagcccgcccgcgagaggaaaaggaaaaaaagaaggataatgaaggcgcctgctgcagaagccgtggcagaaggggcatcaggtagacatgggcaaggccggtcactggaggcagaagacaaaatgacccatagaatcttgagagcagctcaggaaggagaccttccagagttacgcaggctactggaacctcacgaggctgggggagccggaggaaatatcaatgcccgcgatgccttctggtggactccactgatgtgcgcagccagggctggccagggagctgctgtctcctatttgctagggagaggtgctgcatgggtgggagtttgcgagttatccggacgtgacgcagctcaactggcagaagaggccgggttccctgaagtggcacgtatggtgagagaaagccatggggaaacacgaagtccggaaaaccgttctcccacaccaagcctgcagtattgcgagaattgtgatacccattttcaagactctaatcatcgaacatcaacagctcacctcctgtcgctgagccagggcccacaacccccgaacctccccctcggggtgccaatctcctctcccggctttaaactgttgctcagaggggggtgggagccaggaatgggtctgggacccagaggagaggggcgcgccaatcctatccccacagtgcttaagcgcgaccaagaggggctgggataccgtagtgccccacagccccgcgtgacacacttcccagcctgggatactcgggctgttgccggcagggaacgcccaccccgagttgccactcttagctggcgcgaagaaagacggcgcgaggagaaagatagggcatgggaacgggatctgcgaacctacatgaatctggagttctag

SEQ ID NO: 344492 - DNA, 459 bp, Artificial Sequence
  derived and/or modified sequence
atgagccggcccctgctgatcaccttcacccccgccaccgacccctctgatctgtggaaggatgggcagcagcagccccagccggagaagcccgaaagcacgctggatggtgccgccgcactggccttctatgaggctcttatcggagatgagtcgtctgcccccgactcgcagcgttctcaaacagaacccgcgagggaaaggaagcgtaagaaacggcgcatcatgaaggcacctgcagccgaggctgtagccgagggggcttccggcaggcatggtcaggggcggagtctagaggccgaggataaaatgacccacaggatcctcagggcagcacaagagggggatttgccagaactgcgcagactgttggaaccacacgaagccggcggggcaggaggaaatataaacgcgagggacgcattctggtggacccctctgatgtgcgccgcacggtag

SEQ ID NO: 344493 - DNA, 1071 bp, Artificial Sequence
  derived and/or modified sequence
atgagccggcccctgctgatcaccttcacccccgccaccgacccctctgatctttggaaggacggacagcagcaaccacaacctgaaaaacctgaatcgacgcttgatggtgccgccgccctggccttctatgaggcactgattggcgatgaaagttccgccccagattcccagcgcagccagacggaacccgcacgggaaagaaaacggaagaaacggagaatcatgaaggctccggccgccgaagctgtggctgaaggggcatccggaaggcacggtcagggccggagtttggaagcggaggataagatgacacacagaattcttagggcagctcaggaaggagacctccctgagctgagacgcctgctggagccacacgaagccggcggtgctggcgggaacatcaatgccagggacgccttttggtggactccccttatgtgtgctgcgcgcgctgggcaaggagccgcagtgagctacttattgggcaggggggcagcttgggtaggggtgtgcgaactgtccggacgagatgcggcccagttggccgaagaggccggcttccccgaggtcgccaggatggtgcgtgagagccatggagagacccgctctccagagaaccgcagccccacgccgagcttacaatattgcgagaactgcgacacacacttccaggactcgaatcatcgcacctctacagcccacctgctgtcactctctcagggtccccagccacccaacctacctcttggcgtgccaatcagtagcccaggattcaagctgctgctgagagggggatgggagccaggtatgggcctgggccctcggggtgagggccgcgcaaatcctatccctactgtgcttaaacgggaccaggaggggctgggttaccgatcagcaccccagcctcgggtgacgcacttcccagcgtgggacacccgcgcagtggcgggccgcgagaggcccccccgcgtggctactctgagctggcgcgaagaaaggaggcgagaagaaaaggatagggcctgggaacgggatttacgcacgtacatgaacctagagttttag

SEQ ID NO: 344494 - DNA, 498 bp, Artificial Sequence
  derived and/or modified sequence
atgagccggcccctgctgatcaccttcacccccgccaccgacccctccgacctgtggaaagatggccagcagcagccacagcccgagaaaccagagtctacacttgatggggcagcggctctcgctttttatgaggcactcatcggggacgagagctccgctccagatagccagcggtcgcagactgagccggcccgcgagaggaaacgcaagaaaagacgcatcatgaaggcgccagccgctgaggctgtagccgagggagccagcggccggcacggccaggggcgatccctcgaggcagaggataagatgacccaccggatactcagggctgcccaggagggcgacctgcccgaactgcgcaggcttctagaaccccatgaagccgggggcgcgggcggaaacatcaatgccagagacgcattctggtggacacccctgatgtgtgccgctcgtgctggacagggcgcagctgtcagctacctcctcggccggtag

SEQ ID NO: 344495 - DNA, 273 bp, Artificial Sequence
  derived and/or modified sequence
atgagccggcccctgctgatcaccttcacccccgccaccgacccctccgatctctggaaagatggtcagcagcaaccccaacccgagaagccagagagtactctggacggggctgctgcccttgcattctacgaagccttaataggcgacgaaagcagtgcccctgacagccagagaagtcagaccgagcctgccagggagaggaaacgtaagaagaggaggatcatgaaggctccagccgctgaggccgtcgcggaaggggccagcggttag

SEQ ID NO: 344496 - DNA, 324 bp, Artificial Sequence
  derived and/or modified sequence
atgagccggcccctgctgatcaccttcacccccgccaccgacccctccgatttgtggaaggacgggcagcagcagccccaacccgagaaacctgagagtacgctggacggggccgcagctctggctttttacgaagcgctgattggcgacgagtcatcagcccccgatagccagaggtcacagacagaacccgcacgggaacgcaagcggaagaaaagaagaatcatgaaggccccggccgctgaggcagtcgcggaaggagcaagcggaagacacgggcaaggacggagccttgaggcagaggataagatgacccatcggtag

SEQ ID NO: 344497 - DNA, 498 bp, Artificial Sequence
  derived and/or modified sequence
atgagccggcccctgctgatcaccttcacccccgccaccgaccccagtgatctgtggaaggatggccagcagcagccccagccagaaaagccagaatctactcttgacggggcggccgcgctcgccttttatgaggcgttaattggggatgagagcagtgcacctgactcgcaacgcagccagactgagcctgccagagaacggaagcggaagaaacggcggatcatgaaggcaccggctgctgaagccgtggccgagggagcaagcgggcgccatggtcagggtcggtccctcgaagcggaagataagatgactcatcgaatactgcgggctgcacaagaaggggacctgcccgaacttcgccgcctgctggaacctcatgaggctggaggggctggcggaaatatcaacgctagagacgctttctggtggacacctctcatgtgcgcagcacgtgccgggcagggcgcggccgtttcctatctactgggccgctag

SEQ ID NO: 344498 - DNA, 459 bp, Artificial Sequence
  derived and/or modified sequence
atgagccggcccctgctgatcaccttcacccccgccaccgacccctctgatttatggaaagatgggcagcagcagcctcagccagaaaaacccgaatctactttggacggggccgctgctctggccttttatgaagccctgatcggagacgaaagctccgcacccgatagtcaacggtcacaaacagaacccgccagagagcggaagcgaaagaagaggcggatcatgaaggccccggcagccgaagccgtggcagagggagcatccggacggcacggccagggacggtcgctcgaggctgaggacaaaatgacgcaccgtatcctgagagctgcacaagaaggggatctgccagagcttaggaggttacttgaaccacatgaggccggaggggctgggggcaacattaacgcaagagatgctttttggtggacccctctgatgtgcgccgccaggtag

SEQ ID NO: 344499 - DNA, 459 bp, Artificial Sequence
  derived and/or modified sequence
atgagccggcccctgctgatcaccttcacccccgccaccgacccctccgatctctggaaggatggccaacagcagccacagcccgagaaacccgaatctactctggatggggcagccgcgctggctttctacgaagcattgattggcgatgaatcctctgctcccgattcccagaggtctcagactgaaccagctagggagaggaaaagaaagaagcgcaggattatgaaggctcctgccgcggaggcagttgcggaaggtgcctcaggtagacacggccaagggaggtccctggaagcagaagacaagatgacccatcggattttgagggctgctcaggaaggcgacctgccggaattgcgcagactcctggagccacatgaggccggcggcgctgggggtaacataaatgcccgcgacgctttttggtggacacctttaatgtgtgcggccagatag

SEQ ID NO: 344500 - DNA, 597 bp, Artificial Sequence
  derived and/or modified sequence
atgagccggcccctgctgatcaccttcacccccgccaccgacccctcagatctgtggaaggatggtcaacagcagcctcagcccgaaaaacctgaaagtaccctcgatggagctgcagcattggccttctatgaggccctgatcggtgacgaaagtagcgccccagatagtcagagatcccaaaccgaacccgctagggaaaggaaaagaaagaagcgacgcatcatgaaggcgcctgccgccgaggcggtcgcagagggagcatccgggcgtcacggacaggggcgttctctggaggccgaagataaaatgacccatcggatacttcgagcagctcaagagggagatctcccagagctgcgtagactgctggaaccacatgaggccggaggggcgggagggaatattaacgcacgggacgccttttggtggacacccttaatgtgtgcagcacgagctggacagggcgccgctgtttcttacctcctcggaagaggagccgcatgggtgggcgtgtgcgaattatccggccgtgatgctgcacagctggcggaggaggccggcttcccagaagtggcaagaatggtccgtgagtag

SEQ ID NO: 344501 - DNA, 597 bp, Artificial Sequence
  derived and/or modified sequence
atgagccggcccctgctgatcaccttcacccccgccaccgacccctccgacctgtggaaggatggacagcagcagccccagcccgaaaagccagaatctaccctggatggcgcagctgccctcgccttctacgaagctctgatcggcgatgaatcaagcgcccccgactcacaaaggtctcagacagaaccagctcgggagcggaaacgaaagaagcgccggattatgaaggcacctgcagcagaggccgtggcagagggtgctagtggacggcacggccagggccgctcgctggaagctgaagacaagatgactcatagaatactacgcgctgctcaggaaggcgatctccccgaattgagacggctcctagagccccacgaggccggaggagccggaggcaacattaacgcccgggacgcattctggtggacaccgcttatgtgcgcggctagggctgggcaaggggcggcagtgtcctacctactgggccggggggccgcgtgggtgggtgtgtgcgagctgtccggcagagacgccgcacagctagctgaggaggccggcttccctgaagtggcaagaatggtgcgcgagtag

SEQ ID NO: 344502 - DNA, 1071 bp, Artificial Sequence
  derived and/or modified sequence
atgagccggcccctgctgatcaccttcacccccgccaccgacccctccgatctctggaaagacggccaacaacagccacagccagagaagccagagagcaccctggacggcgccgccgctctcgccttttacgaagccttaattggagacgagtcatcggcacccgatagccagaggtctcagactgaaccagctcgggaaaggaagcgaaaaaaaagacgaattatgaaagcccccgctgccgaggcagtggctgagggagcctcaggaaggcacggacaggggagatccctggaggcagaagacaaaatgacgcacagaatcctgcgcgccgcgcaagaaggcgatctgcctgagctgagacgcctgctggagccacatgaggccggaggagcaggtggcaacattaatgctcgggacgctttctggtggacacctctaatgtgtgcggcacgggcaggccagggcgctgccgtctcctatctcctggggaggggagccgcttgggtcggagtttgtgaactgtccgggcgtgatgcagctcagctggcagaagaagcgggtttcccggaagtagcaaggatggtgcgcgaatcccacggagagacaagatcgcctgaaaatcgttcaccaacccctagcctgcagtactgtgaaaattgtgatacacactttcaggattcaaaccaccgaacgtctaccgcccacctgttgagcctaagccaaggtcctcagcctcctaatctgcccctgggggtgcccattagctcgcccggattcaaactgctgctgcgaggcggatgggaaccagggatgggcttggggcccagaggcgaaggacgggccaaccctatccctacagtcttgaagcgggaccaagagggccttggttatcgcagcgcgccccagccacgcgttacacattttcccgcttgggatacacgcgccgttgctggccgggaacgaccccctcgggttgccaccctgtcgtggcgcgaagagcggcggcgcgaggagaaggatagggcctgggagagggatctaagaacatacatgaatctggagttctag

SEQ ID NO: 344503 - DNA, 597 bp, Artificial Sequence
  derived and/or modified sequence
atgagccggcccctgctgatcaccttcacccccgccaccgaccccagcgatctgtggaaggacgggcagcagcagccccagcccgagaagcctgaaagcaccctggacggcgcggctgccctggcattttatgaggcccttattggggacgaatcctccgcacccgattcgcagcgatcccagacggagccagcacgcgagagaaagaggaaaaagcggaggatcatgaaagcccctgccgccgaggcagtggctgaaggtgccagcggcagacatggacagggccgaagcttggaggcagaggacaaaatgacacatcgcattctgcgagcagcgcaggaaggcgacttaccggaattacggcggttgctggagccccatgaagcaggtggcgctggcggcaacattaatgctagagacgcgttctggtggacccccctgatgtgtgccgctcgcgccggccagggcgcggccgtgagctatctgctggggcgcggagccgcctgggtgggagtgtgtgaactgtccggcagagacgccgcccagctggctgaggaggccgggtttcccgaagttgctagaatggtgcgtgagtag

SEQ ID NO: 344504 - DNA, 1071 bp, Artificial Sequence
  derived and/or modified sequence
atgagccggcccctgctgatcaccttcacccccgccaccgacccctcagacttgtggaaagatggtcagcagcagccccaaccagagaaacccgagtcaacactcgatggcgctgctgcactggcattttatgaggcactgatcggtgatgagtcctccgcacccgatagccagagatctcaaaccgagcctgcccgcgaaaggaagaggaagaaacggaggatcatgaaggcccctgccgcggaagcagtggcggagggcgcatcaggcagacacggccaggggagatcgctcgaggcggaggataagatgacccatagaattttacgcgcagcgcaggaaggggacctgccagagctgcggcgcctccttgagccgcatgaagccgggggggctgggggtaacattaacgccagagacgcattctggtggacacctctgatgtgtgcagcaagggccggtcagggagcggcggtctcttatcttctcggccgtggagccgcctgggtcggggtttgcgaattgtctgggcgcgacgccgctcaattagccgaagaagccggtttccctgaagtggccagaatggtccgtgagagtcatggtgaaacgcggtctcccgagaacaggtcacccacacctagtcttcagtactgcgaaaactgcgatactcatttccaggatagtaaccacaggacctccaccgcccacctcctgtcactgagccagggaccgcagccacccaatctgccattaggggtcccaatctcctcgcccggctttaagctcctgctaagggggggctgggaacctgggatgggtctggggcctcgtggtgaagggagggcgaacccgatccctaccgtactgaagcgggatcaagaggggctgggttaccgtagtgcgccccagcctcgcgtgacgcacttcccagcttgggacactcgtgctgtcgccgggcgggaacgtccccctcgagtggccacgctgtcttggagagaagagaggaggcgcgaggaaaaggatagggcatgggagagggacttgcgaacatatatgaacctcgaattttag

SEQ ID NO: 344505 - DNA, 1071 bp, Artificial Sequence
  derived and/or modified sequence
atgagccggcccctgctgatcaccttcacccccgccaccgacccctccgacctgtggaaagatggccagcaacagccacagccagaaaaacccgaaagcaccctggatggcgccgccgctcttgctttttatgaggccctgatcggtgacgaatctagcgcccccgactctcagcggagtcaaacagagcccgctagagagaggaaacggaagaagcgccgtatcatgaaggctcctgccgctgaggccgtggctgaaggcgcctccggccgacacggccaggggcgctctctggaggctgaggacaaaatgacccatagaatcctccgcgccgcccaagaaggtgacctgccggagttaaggcggcttctcgagcctcatgaggcaggcggcgccggtggcaatatcaacgcaagggacgccttttggtggacgcccttaatgtgtgccgcaagagccgggcaaggcgccgccgtgtcatacctcctaggccgaggggccgcttgggtgggagtctgcgagctttccgggcgggacgctgcacagttagccgaagaagctggatttcccgaggtggcaagaatggttcgcgagagtcacggagagactagatcccccgagaataggagcccaactccttcactgcagtattgcgaaaactgtgacacgcacttccaggactccaaccatcggacttctactgctcatctgcttagcctatcgcagggcccgcagcccccaaaccttccattaggcgttcccatatcctcacctggatttaaactcctcctacgcggggggtgggagccaggcatggggctgggaccccgcggggaaggtcgcgccaaccccattcctactgtgctgaaaagggaccaggaagggctcgggtatcggtcagccccacagcctagagtgacacacttccctgcttgggacacacgcgccgtggctggtcgtgaacgcccaccaagagtagctactctctcttggagagaggaaagaagacgtgaggaaaaggatcgcgcttgggagagagacctgcgcacgtacatgaatctggagttctag

SEQ ID NO: 344506 - DNA, 1071 bp, Artificial Sequence
  derived and/or modified sequence
atgagccggcccctgctgatcaccttcacccccgccaccgaccccagcgatttatggaaggacggccaacagcagccccagccggagaaacccgagtctacgctggacggggccgctgcgctagcgttttacgaggctctgattggggacgagtcttctgctccagactcccaacggagtcagacagagccagctcgggaaaggaagcgcaaaaagcgcagaattatgaaagcgcccgcagccgaagccgttgctgagggcgcctcaggtcgacatggccagggccgctcattggaggcggaagacaaaatgactcacagaatcctgagggcagcccaggagggcgatctacccgaactcagacggctgctggagccacacgaggcaggcggagcaggtggcaacatcaacgctagggatgctttttggtggactccgctgatgtgtgcagcaagggcaggtcagggcgctgccgtcagctacctgctagggaggggcgcggcatgggttggagtgtgcgaactttccggtagggacgccgcacagctggccgaagaggccggttttccagaggtcgcacgaatggtcagagagtcccatggagaaacgcggagccccgagaatcggtctccgacacccagcctgcaatattgcgaaaattgtgatactcactttcaagattccaatcatagaacctctacggcccaccttcttagcctgagccagggcccacaaccacccaacctccctctgggggtccccatttcatccccaggctttaaactcttgttgaggggcggctgggaaccaggcatgggcctgggccctcgaggggaaggtagagcaaacccgatccctaccgtcctaaagcgcgaccaagagggactgggatatcgatcagccccacagccccgagtcacacactttcccgcgtgggacacccgagccgtcgcgggaagagaacgacctccgcgcgttgctaccctctcatggagggaggaaagaaggcgcgaggaaaaggacagggcgtgggagcgggatctccgcacttacatgaaccttgagttttag

SEQ ID NO: 344507 - DNA, 273 bp, Artificial Sequence
  derived and/or modified sequence
atgagccggcccctgctgatcaccttcacccccgccaccgacccctcggacctgtggaaggatggccagcagcagccacagcccgaaaaaccagagtctactctggatggcgcagctgcgcttgcgttttatgaggccctgattggggacgagtccagcgcgcctgattcccagcgatcccagaccgagcccgcgcgggagcgtaagagaaagaagagacgtatcatgaaggccccggcagctgaagccgtggcagagggcgcttccggttag

SEQ ID NO: 344508 - DNA, 273 bp, Artificial Sequence
  derived and/or modified sequence
atgagccggcccctgctgatcaccttcacccccgccaccgacccctccgacttgtggaaggacggccagcagcaaccacagcccgagaaaccagagtccaccctggacggagccgctgccttggctttttatgaggcgctgataggtgacgaatcttctgcccccgatagccagcgctcccagacagagcccgcccgagagcgcaaacgtaaaaaaaggaggataatgaaggctcctgctgcagaggccgtggccgagggtgccagcgggtag

SEQ ID NO: 344509 - DNA, 324 bp, Artificial Sequence
  derived and/or modified sequence
atgagccggcccctgctgatcaccttcacccccgccaccgacccctccgacctgtggaaggatgggcagcagcagccgcagcccgaaaagcctgaatccactctagacggcgccgcagccttagcattttacgaagcactgatcggagacgagtcaagcgcacctgacagtcaaaggtcccagaccgagcccgcaagggagcggaaaagaaaaaagcgccgcattatgaaggctccagcggctgaggccgtcgccgaaggcgcgtcagggcgacacggtcaaggaaggtccctggaggctgaagacaagatgactcaccgctag

SEQ ID NO: 344510 - DNA, 324 bp, Artificial Sequence
  derived and/or modified sequence
atgagccggcccctgctgatcaccttcacccccgccaccgaccccagtgacctgtggaaagatgggcagcaacagcctcagccggagaagcctgagtctaccctggacggcgccgcggccctcgcattctatgaagcacttattggagatgaatcctccgctccagacagtcagaggagccagaccgagcctgccagagagagaaagcgaaagaaaaggaggatcatgaaagcacccgcagctgaagcagttgctgagggagccagtggacgacacggccagggccgaagcctggaagcagaggataagatgacacatcgatag

SEQ ID NO: 344511 - DNA, 1071 bp, Artificial Sequence
  derived and/or modified sequence
atgagccggcccctgctgatcaccttcacccccgccaccgaccccagtgacttgtggaaagacggtcagcagcagccacaaccagagaaaccagaaagcacattggatggagccgccgcacttgcgttttatgaggctctcatcggcgacgaaagtagcgccccagattctcagcgctcccagaccgagccggccagagaaaggaagcggaaaaaacgccgaattatgaaagcacccgcggcggaggctgtggccgagggagcctccggacgccatggacaaggaaggtcacttgaagctgaagacaaaatgactcaccgcatcctgagagcggcccaggagggcgacctccctgaactgaggcggcttctcgaaccgcacgaggcgggtggcgccgggggaaatatcaatgccagagatgccttctggtggactcctctcatgtgcgccgctagagcgggtcaaggcgccgctgtatcatatctgctgggcaggggagctgcctgggtcggcgtgtgtgaactatctggaagggacgccgctcagttagccgaggaggcgggctttcctgaggtggcacggatggtacgcgaatcccacggtgagacaagatccccagagaatcggtctcctaccccaagtctgcaatactgcgaaaactgcgatacccatttccaggactccaatcatagaacgtccacggcccatctgctgtccctgagccagggccctcaaccccctaaccttcccttaggagtgccgattagctcacctggattcaagttgctgctccgtggcgggtgggagccaggaatggggctcggtcctcggggcgagggacgcgccaaccccatacctacagtgttgaaaagggaccaagaaggcctgggatatagatctgcgccacaaccgcgggtaacccatttccccgcatgggacacgagggctgtggccggacgggagagacctccgagggtggcaacgttgtcctggagggaggaacgccggcgtgaggaaaaagaccgggcatgggagcgcgaccttcgcacctatatgaaccttgagttctag

SEQ ID NO: 344512 - DNA, 498 bp, Artificial Sequence
  derived and/or modified sequence
atgagccggcccctgctgatcaccttcacccccgccaccgacccctccgacctctggaaagatggtcagcagcagccccaacccgagaaacctgagtccacactagacggcgccgcggctctggcgttttatgaggcactgattggcgatgaatccagcgcccccgactctcagagaagtcagaccgaacctgctagagagcggaaacgtaaaaaacgaaggattatgaaggccccagctgcagaggctgtggctgaaggcgcgtcggggaggcacggccaaggacgttccctggaggccgaagacaaaatgacccaccggatcctccgagctgctcaggagggtgacctccccgaattgcggcgcctgctggagcctcatgaggcggggggcgcaggtgggaacattaacgccagggacgccttttggtggaccccactcatgtgcgcggcccgcgccggacaaggcgcggccgtgtcatacttgctgggcaggtag

SEQ ID NO: 344513 - DNA, 1071 bp, Artificial Sequence
  derived and/or modified sequence
atgagccggcccctgctgatcaccttcacccccgccaccgaccccagtgacctgtggaaggacgggcagcagcagcctcagcctgaaaagccagaaagtacactggatggcgccgcagccttggccttctacgaagctcttattggcgatgaaagctcagcccctgactcccagcgttcgcagacagagccggcacgagaacgcaagcgtaagaaacgtcggataatgaaagctccagcagcagaggccgtcgctgaaggcgcctctgggcgccacggccaggggaggtcattagaagctgaggataaaatgacccaccgcattctgcgggcagcccaggagggagacctgcccgagctgcggcgtttgcttgaaccccatgaggcaggcggtgcaggcggcaacatcaacgctcgagatgcattctggtggacgcctttgatgtgcgccgctcgggccggtcagggagctgccgtaagttacctgttgggtaggggggctgcatgggtgggtgtgtgcgagctgtccgggcgagatgctgcccagttagccgaggaagctgggttcccagaggttgctcgcatggttcgagagtcccatggagagacccgaagccctgagaataggtcaccaaccccatcgctacagtattgcgaaaactgtgacacacacttccaagatagtaaccacagaaccagcactgcacatttactttcactaagccagggcccgcagccccctaatctgcccctcggggtcccgatctcgtcacctggcttcaagctgctcctccgtggtggctgggaaccaggtatgggactcgggccacgaggtgaaggccgggctaacccgatacccacagttctcaagcgcgatcaggaaggccttggatataggtcagcgccacagcctcgagttactcactttccagcgtgggacaccagagcggtggccggccgggaacggcctccacgtgtcgccaccctgtcatggagggaggagcggagacgggaagagaaggatcgagcctgggaacgggacctgagaacatacatgaatctagaattttag

SEQ ID NO: 344514 - DNA, 1071 bp, Artificial Sequence
  derived and/or modified sequence
atgagccggcccctgctgatcaccttcacccccgccaccgacccctctgacctctggaaggatggtcagcagcagcctcaacccgagaagccggaatcaacacttgatggtgcagccgctctagcattctacgaagctctcatcggcgatgaatctagcgctcccgactctcagcgttcccagacagagccagcaagggagcggaaaagaaagaaacggaggatcatgaaagctcctgcagcagaagcagtcgccgagggagctagcgggcgccatggccagggcaggtcccttgaggctgaagacaaaatgacccatcgtattttgcgggcggctcaggagggtgacttgccggaactgcggcgtcttctcgaaccccacgaagccgggggcgcaggcggaaatatcaacgccagagacgctttctggtggactcccctgatgtgcgccgcccgagccggccagggcgctgcggtaagttatctgctgggcaggggagccgcctgggttggagtttgtgagctgtccggtcgggacgcagcccaactggctgaggaagcaggattcccagaagtggctaggatggttagagaatcccacggggaaacccgatcccccgaaaatcggtcccccactccatcgcttcagtattgcgagaattgcgatacccatttccaggattcgaaccaccgcacaagtaccgctcacctcctgtccctctcacagggacctcagcctcccaacctgcccctcggagtccccatcagctcgccaggctttaagctgttgttgcgaggcgggtgggaacctggaatgggcctgggtcctcgaggagaggggagagccaacccaatcccgaccgtgctgaagcgagaccaggaaggactgggctataggagcgcaccgcagccgagagtaacccacttccctgcttgggacaccagagccgtggcaggtcgcgaaagaccgcctcgtgttgcgaccttgtcatggagggaggagcggagaagagaagaaaaagatagggcttgggagagagatttgaggacttatatgaatctggagttctag

SEQ ID NO: 344515 - DNA, 1071 bp, Artificial Sequence
  derived and/or modified sequence
atgagccggcccctgctgatcaccttcacccccgccaccgacccctctgacctctggaaggatgggcagcagcagccccaaccagagaaaccagaatctactctcgacggcgctgccgcactggcattttacgaagccttaatcggagacgaatcctcagcccccgattctcaaaggagccagactgagccagcaagagagcgtaagagaaagaaacggcggatcatgaaggctccagcagccgaagccgtggccgaaggcgctagcggtagacacggacagggtcggtctctcgaggctgaggataaaatgacccaccgaatcctgcgggccgcccaggagggagacctgcccgaactcaggcggctgctggaaccacacgaggccggtggcgcagggggcaacattaacgcccgggacgctttctggtggactccactgatgtgtgctgctagggccggacagggtgccgccgtgtcatatctgctcgggaggggggctgcttgggtgggcgtgtgcgaactgtctgggcgggatgctgctcagctggccgaagaggcggggtttcctgaagtagctaggatggttcgggagagtcatggggaaacaaggtcacctgagaacaggagccccactccttcactccaatattgtgagaactgcgacacacacttccaggattccaaccaccgcacctctaccgctcatttactatcattgtcccagggcccacaaccccctaatcttcctttaggcgtgccaattagttcgcccggctttaagttactcctgcgggggggatgggaacccgggatgggtcttggaccgagaggagagggacgcgctaaccctattcccactgtgttaaagcgggatcaggagggactggggtatagatctgccccacaacctcgagtaactcattttccagcgtgggatacacgggccgttgctgggagggaacggccaccgagggtcgcaacactgtcctggagagaagaaaggcggcgggaagagaaggacagagcatgggaaagagaccttcgaacctatatgaatctggaattttag

SEQ ID NO: 344516 - DNA, 1071 bp, Artificial Sequence
  derived and/or modified sequence
atgtctaggccactgttgattacattcactccagcaaccgatcccagtgacctctggaaggatggccagcagcagccccagccagaaaaacccgagtctacgctggatggagccgcagctctcgcattctacgaagctttaatcggcgatgagtcttcggcccctgattctcagaggtctcaaaccgaacctgcaagggaacggaaacgcaagaaaaggaggatcatgaaggctcccgcagcagaggcagtggccgaaggagcttcagggcgacacgggcagggaagaagcctggaggccgaggacaagatgactcatcggatacttcgggcagcacaggagggcgatctaccagagttaagaaggctcctggaaccacatgaggccggaggggctggcggaaacatcaatgcacgcgatgccttttggtggaccccactgatgtgcgccgctcgagccggacaaggcgctgccgtgagctaccttctgggcaggggggcagcctgggtcggggtgtgcgagctgagcggacgcgatgcagcgcagctggcagaagaagccggattccctgaggttgcacggatggtgcgggagagtcatggggaaacccggtcccctgagaaccgctctcctacaccttcactccagtactgtgagaactgcgacacccatttccaagactctaatcaccgaacgtcaaccgcccacctcctgtccttgagccagggccctcagcctccaaatcttccactgggcgtacccataagtagtccgggttttaagttacttctgcggggtggctgggagccgggaatggggctggggcctcgcggtgaagggagggctaatccaatacctactgtgctgaaaagagaccaggaagggctcggttaccgctccgcgccacaacccagagtgactcactttccggcttgggacaccagagctgttgccggtcgcgaacgccctcctcgagtagccactctgtcctggagggaagagcggcgaagagaggagaaggaccgagcatgggagcgagacctccgaacttacatgaatttggagttttag

SEQ ID NO: 344517 - DNA, 1071 bp, Artificial Sequence
  derived and/or modified sequence
atgtcacgtccactccttattacattcacccccgctacagacccctctgacttgtggaaagatgggcaacagcagccacagcccgagaagcccgaatcgaccctcgatggcgcagccgcactcgccttttatgaggcattgatcggcgacgagtcctccgctcccgactcacaacgttcccagactgaacccgcacgggaaagaaagcgaaaaaaacgcaggatcatgaaagcaccagccgcagaggctgttgccgagggagcctctggccgacacgggcaaggtcgaagcctcgaggcagaggataagatgacgcaccgaatcctgcgtgcggctcaagagggagacctgcccgagctgcggagactgctcgaaccccacgaggctggcggtgcaggtggaaacatcaacgcgagggatgctttctggtggacgcccctgatgtgtgccgcaagagcgggtcagggcgctgccgtgtcctacttgttgggccgaggagccgcttgggtcggtgtctgtgagctgtcgggccgtgacgctgcgcagttggcagaagaggctgggtttccagaggtcgctcggatggttcgggagtcccatggtgaaacacgctctcctgagaacaggtctcctactccaagcctccagtattgcgaaaattgcgatacccactttcaggacagcaatcacagaacatcgaccgcccatttactgagcttgagccaaggcccacagcctcccaacttgcctctgggtgtgccaatcagcagccccggttttaaactcctgctgcgcggaggttgggaacccggaatgggactgggccctcgcggagagggacgtgctaaccctatccccacagtcctaaagagggaccaggagggactgggatatcggagcgcccctcagcccagggtcacacacttcccggcttgggacacccgcgctgttgcaggcagagagaggccgccacgcgtggcaacactgagctggagggaagagcgcagaagggaagaaaaggaccgggcttgggagcgggaccttcgcacatacatgaacttggaattttag

SEQ ID NO: 344518 - DNA, 1071 bp, Artificial Sequence
  derived and/or modified sequence
atgtccagacctctgcttatcacattcactcccgctacagatcctagcgacttatggaaggatgggcagcagcaaccacagcctgaaaagcctgagtctaccttagacggcgcagccgctctggctttctacgaagcactgattggtgacgaaagctcagcaccggattcccaacgctcccagacggaaccagccagggaaaggaaaaggaagaagcggcgtatcatgaaggctcccgcagcggaggcggttgctgagggcgctagtgggagacatggccagggacgcagtctcgaagccgaggacaaaatgactcacaggatcctgcgggctgcccaggaaggggatcttcctgagttgaggcggctgttagagccgcacgaagctggtggagccggaggaaatatcaacgcacgagacgctttctggtggacacctttaatgtgcgccgcaagggcgggacagggagcggctgtctcttacttactgggacggggagctgcgtgggtcggtgtttgcgagttgagcggaagagacgcagctcagctggcagaagaagctgggtttccggaggtggcaaggatggttagagagtcccacggcgagacacgatcccccgagaaccggagcccaacacccagcctgcaatactgcgagaactgcgacacccattttcaggacagcaaccacaggacgtccactgcccatctgctttcgctttcccaggggcctcaacctcccaaccttccgttaggtgtgcctatatcctcacctgggttcaagctgcttctgagggggggatgggagcctggaatgggtttgggccctcgcggagaaggcagggccaacccaatccctacagtacttaaaagagaccaggaaggactgggctatcgcagtgcaccccagccgagagtaacacatttccctgcttgggacactcgcgcagtagctggccgtgagaggccaccacgtgttgccacgctttcttggcgggaagaaagacggcgagaagagaaggatcgggcatgggaacgcgacctgcgcacttatatgaacctcgaattttag

SEQ ID NO: 344519 - DNA, 1071 bp, Artificial Sequence
  derived and/or modified sequence
atgagccgccctctcttgattaccttcactccagccacggatccatcagacctgtggaaagacggacaacagcagcctcagcctgagaagcccgaatccactcttgacggcgctgcagccctcgccttctacgaggccctgattggagatgagagtagcgcccctgattctcagagatcgcagaccgaaccagcaagggagaggaaaaggaagaaaagaaggattatgaaggctccggctgccgaagctgtggccgagggcgcatctgggaggcacgggcagggcagaagcctagaggcggaagacaaaatgacgcatcggattctgcgtgctgctcaagaaggggacttgcccgagttgcgacgtctgcttgagccacacgaggctgggggtgcagggggaaacataaacgctagagatgccttctggtggacgccactgatgtgtgccgcacgggctggccagggcgctgcagtgtcatacctccttggacgaggcgcagcttgggtgggcgtgtgcgagttaagcggacgcgatgcagctcagctggccgaagaagccggtttcccagaagttgcaaggatggtgcgagagtcccatggagagacacgttctcccgagaataggagtccaaccccaagcctgcagtactgcgagaattgtgatacccattttcaggactcaaaccacaggacatcaacggcgcatcttctctccctgagtcagggaccccaaccccctaacctaccactaggcgtgcctattagctcaccaggattcaaactgctcttgagaggaggatgggagccagggatgggcctaggtcccagaggtgaaggtcgtgccaaccccatacctacagtcctgaagagggatcaagagggactgggatacagaagtgcccctcaaccacgagtgacccattttcccgcatgggatacaagagctgtggccggtcgggaaagacccccaagagtcgctacactgagttggagagaggagagacgccgagaggagaaggaccgggcatgggaaagggacctgcgcacctatatgaacttggaattctag

SEQ ID NO: 344520 - DNA, 1071 bp, Artificial Sequence
  derived and/or modified sequence
atgtcgcgaccccttctgatcacatttacccccgctactgacccgagcgatctttggaaagatggccagcaacagcctcagcctgaaaagccagaaagcactctggacggagcagctgccctcgccttctatgaggctctcattggcgatgagtcaagtgcgcctgacagccagaggagtcagacagaacctgcacgcgaaaggaagagaaaaaaacgcaggattatgaaggccccagctgccgaggccgtggctgagggcgctagcggtagacatgggcaaggcaggtccctagaagctgaagataaaatgacacatagaatactgagggcagcgcaggaaggcgacctgccagagctgcgtaggctgttggaaccccacgaggctggcggagccggaggaaatattaacgccagggacgcgttctggtggacgccgttgatgtgtgctgctcgggctggacaaggagccgcagtcagttaccttctgggaaggggcgctgcctgggtcggagtatgtgaattatcaggtcgcgacgcagcccaactggcagaagaagccggattcccagaggttgccaggatggttcgtgaatcccacggagaaacacggtcccctgaaaacaggtcccccactccttccctacagtactgcgagaactgcgacacgcactttcaggatagcaatcatcgcacatccaccgcccatctgctaagcctcagtcaggggcctcagccccctaatctccccctcggcgtgcctatctccagcccgggatttaaactccttctgcgtggcggatgggagcctggaatggggctcggccctcgcggagaggggcgtgcaaatccgatacccaccgtattgaagagggatcaggagggattggggtaccgttctgcacctcagccaagagttacccattttccagcctgggacacacgcgctgtcgccggaagggagcgaccacccagggtcgccacactttcatggcgagaggagcgaagaagagaggagaaagaccgcgcatgggagcgggacctcaggacttacatgaatctcgagttctag

SEQ ID NO: 344521 - DNA, 1071 bp, Artificial Sequence
  derived and/or modified sequence
atgtctcggccactcctgattacgtttacaccagctacggacccatcagacctgtggaaggacgggcagcagcagcctcaaccagagaaacccgagtcgaccctcgacggggctgctgcgctggcgttttacgaggcattaattggggatgagtccagcgctccagactcccagcgcagccagacggaacctgcgcgtgaaaggaagcggaaaaaaagacgcatcatgaaggcccctgccgctgaagcggtcgccgaaggggcaagtggacggcatgggcaggggcgttctctggaggccgaggataaaatgacacaccgcattcttcgggcagcacaggagggcgacctccctgagctgagacgcctcctggagccacacgaggccggaggcgcaggcggaaatatcaatgccagggacgctttctggtggacaccgcttatgtgtgcggcacgcgcaggtcagggagctgcagtttcgtacttgttggggagaggcgcagcctgggttggagtctgtgaactgtcgggccgagacgccgctcaacttgccgaggaggcagggttcccagaggtggccagaatggtgagggagtcacacggagagacgagatcccccgagaatagatccccaactccctctctgcaatactgcgagaattgtgatactcattttcaagattccaaccaccgcactagcaccgcccatctgctctcactgagtcaggggccacaacccccaaatctgccactgggagtgccgatttcaagcccaggcttcaaactgctgctccgaggcggatgggagcccggaatggggctgggtcctcgtggcgagggaagagccaaccccatccccacggtgctaaaacgtgatcaggagggattgggatatcgatccgcccctcaaccacgggttacccactttccggcatgggacacccgggctgtcgcagggagagaacgaccccctagggtcgccacactgtcctggcgcgaggagagacgtcgggaggagaaagaccgggcttgggagcgtgacctgagaacgtacatgaacctcgagttctag

SEQ ID NO: 344522 - DNA, 459 bp, Artificial Sequence
  derived and/or modified sequence
atgtcgcggcctcttttaattacgttcaccccagccacggaccctagcgacctgtggaaggacggccagcagcaaccccagcctgagaagcccgagagcaccctggacggcgcagcagccctggccttttacgaggccctcatcggggatgaaagctcggccccagatagtcaacgctcccagacagaacccgctcgggagcgcaagcgtaaaaagcgcagaattatgaaagctcctgctgctgaggctgtggcagagggggcttccggtcggcatggtcagggcagaagcctcgaagctgaggacaaaatgacccacaggattctccgggctgcacaggaaggcgatctcccagaactccgcagacttcttgaaccacatgaagccggaggtgctgggggtaacattaacgctagagatgcattttggtggaccccactgatgtgtgccgctcgctag

SEQ ID NO: 344523 - DNA, 1071 bp, Artificial Sequence
  derived and/or modified sequence
atgtctcgacctctgctaatcacctttaccccagccacggacccatccgatctttggaaggatggtcagcagcagccccagcctgagaagccagaatccacactggatggcgctgcagccctagccttctatgaagccctgattggagatgaaagctccgcccctgactctcagaggagtcagacagagccagctagggagcgtaagaggaagaagagaaggattatgaaggcgccagctgccgaagcggtcgccgaaggcgcatcaggccgacacgggcagggaaggtcgctggaggcagaggataagatgacacacaggatattacgggctgcccaggagggcgacctgccagaattgcgtcgattgctggagccccatgaggcaggtggagcaggcggaaatatcaatgccagggatgctttttggtggacaccacttatgtgtgcagcaagagcgggtcaaggcgcagctgttagctacctgttgggtaggggagccgcatgggtaggagtatgcgagctatccggcagggacgccgcacagctggcagaggaggccggatttccggaagtggccaggatggtacgcgaatcgcacggagagactaggtcccccgagaatcgctctcctactccctctctccagtattgtgagaattgcgatacgcacttccaggacagcaatcacaggacatcaacagcccacctcctctcactaagccagggaccacagccaccgaacctgcctctgggcgtgcccatcagttcacccggattcaagttgttgctgcggggtggctgggagccaggtatgggattgggtcccaggggcgaaggtcgcgctaaccccatcccgactgtgttgaagcgggatcaggagggtttaggctaccgctccgcccctcagcccagggtcacccacttccctgcatgggacacacgagccgtggcaggcagagaacgacccccaagggtcgccactctgtcatggcgcgaggaacgcagacgtgaagagaaggacagggcctgggagcgggatctgcgcacctacatgaatctggaattttag

SEQ ID NO: 344524 - DNA, 498 bp, Artificial Sequence
  derived and/or modified sequence
atgtcccgacccctgttaatcacatttacaccagcaaccgatccaagcgatctctggaaggatggacaacagcaaccccagcccgaaaaaccggaaagtacgctggatggggcagctgctctggctttctatgaagcccttataggggacgagtcaagcgcgcctgacagccagcgtagccagacagagcccgcacgtgagcggaagaggaagaagcgccgaataatgaaagcccctgccgctgaagccgtggccgagggcgcttccggcagacatgggcaggggcgaagcttggaggctgaggacaagatgacccaccgcattttgcgagctgcacaggaaggcgacctacctgagttgcggcgactcttagaaccacacgaagccggaggagctggcggtaacattaatgcaagggacgccttctggtggactcccctgatgtgtgccgctcgcgcaggccagggtgcagcagtgagttacctattgggccgatag

SEQ ID NO: 344525 - DNA, 273 bp, Artificial Sequence
  derived and/or modified sequence
atgtctaggccgctattgattaccttcacccccgcaaccgatcctagtgacctctggaaagacggtcagcagcagccacagccggagaagccagagagcacgctggacggggctgccgcactggcattttatgaggcccttatcggggacgagtcgagcgcgcctgacagccaacgtagtcagacggagcctgcacgcgaaaggaaaaggaagaaaagacggattatgaaggccccagccgctgaggccgtggccgagggagctagcggatag

SEQ ID NO: 344526 - DNA, 324 bp, Artificial Sequence
  derived and/or modified sequence
atgtcacgtcccttgctaattactttcactccagctactgatcctagtgatctctggaaagatggccagcagcagccccagcccgagaagccagagtccacactggacggggctgctgccctagccttctatgaggccttgatcggtgacgagtccagcgcacccgactctcagaggagccaaaccgagccagcccgtgagaggaaaaggaagaagcgcaggataatgaaagctccagcagcagaggccgtggcagaaggggctagtggacgccacggccagggccgtagcctggaagcagaagataaaatgacacacagatag

SEQ ID NO: 344527 - DNA, 498 bp, Artificial Sequence
  derived and/or modified sequence
atgtcacggccactcctcattacattcacccctgccactgatccatctgatctctggaaagacggccagcaacagcctcaacctgaaaagcccgaaagtactctggacggggctgccgcactcgcattctacgaagctctgatcggcgatgagtctagtgctcctgacagccagcgctctcagactgagcccgctcgggagcgtaagaggaaaaagaggcggatcatgaaggcaccagctgctgaagccgtggccgaaggcgcttcggggcgtcacggccaggggaggtcccttgaagcagaagacaaaatgactcataggattctgagggcagcgcaggagggcgacctgccagaactacgacgcttgctggagccacacgaagctggaggagccggtggcaacatcaatgcaagggatgctttctggtggaccccactcatgtgcgccgctagagccggacagggggcagcagtttcctacctattgggcaggtag

SEQ ID NO: 344528 - DNA, 459 bp, Artificial Sequence
  derived and/or modified sequence
atgagtaggccgctgctcattacattcacccccgcaaccgacccaagcgacctttggaaggacggtcagcaacagccccagcctgagaagccagagagcaccctcgacggagccgcagcgctcgctttctacgaggccctgatcggagatgagtcctctgcacctgatagccaaagaagccaaaccgagcccgctagagagaggaagcggaaaaaacggagaattatgaaggcaccagcagccgaagccgtggctgagggcgcatccggccgacatgggcaagggcgtagtttggaagccgaggacaaaatgacgcacagaatcctccgagccgcacaggaaggcgacctacctgagctcaggagactgctggaacctcacgaagccggtggcgctggagggaatattaatgctcgggacgccttttggtggacgcccctaatgtgcgcagcgagatag

SEQ ID NO: 344529 - DNA, 459 bp, Artificial Sequence
  derived and/or modified sequence
atgagcagacctctcctaattaccttcactccagccaccgatcctagtgacctctggaaagacggccagcaacagccgcagcctgaaaagcccgagagcacattagacggtgcagcggctcttgctttttatgaggcactgattggagacgaatccagtgctccagactctcagcggtctcaaacggagccagcccgagagcggaaaaggaaaaagagacgcattatgaaagctcccgctgccgaggctgtggccgaaggcgcatctggaaggcacggacaggggcgttcactcgaagcagaggacaaaatgacacatagaatcttacgcgcagctcaggaaggagacctgcctgaactgcgcagactactggagccccacgaagccggaggagcgggtggaaacatcaatgcacgtgacgccttttggtggacccccctgatgtgcgcagccaggtag

SEQ ID NO: 344530 - DNA, 597 bp, Artificial Sequence
  derived and/or modified sequence
atgagcaggccactgctgattactttcacccctgccacagacccatcggatctctggaaggacgggcagcagcagccacagccagagaagccggagagcacactggatggggctgccgctctcgctttctatgaagctttaatcggagatgagagctccgctccagacagccagcggtctcagacagagcctgcgcgagaacgtaagaggaaaaagcgacgaataatgaaggcccctgccgctgaagcagttgcagagggcgcatctggcaggcatggtcaggggcgaagtctggaggcggaggataagatgacccacaggatactgcgggctgctcaggagggcgatctgcctgagctgcgaagactgcttgaacctcacgaggcaggcggagccggaggtaatattaacgcaagggacgctttttggtggaccccattgatgtgtgcagccagagcagggcagggagccgcagttagctatctgctgggcagaggcgctgcttgggtgggggtgtgtgaattgtcaggccgagacgccgcacagctagcggaggaggccggattccctgaagtcgccagaatggtaagggagtag

SEQ ID NO: 344531 - DNA, 597 bp, Artificial Sequence
  derived and/or modified sequence
atgagtcgtccactgcttattacatttactcccgcaaccgacccctccgacttatggaaggatgggcagcagcaaccacaaccagagaaaccagagtccactctggacggggctgctgctttagcattctacgaggctctgatcggagacgagtcttcggccccagacagtcagaggagccaaactgagccagctcgggagcgcaagcggaaaaagcgtcgcattatgaaggccccagccgcagaggcggtcgctgagggcgctagtgggaggcacgggcaaggtagatccctagaagcagaggataaaatgacgcataggattctaagagcagctcaggagggagatctgcccgagttgaggcggcttttggaacctcatgaagctggcggtgccggtggtaacatcaacgccagagatgccttctggtggacgcctctgatgtgcgccgctcgtgcgggacagggggcagcggtgagctatctgctgggtcgtggggctgcttgggtgggggtgtgcgagctgtccggaagggatgccgctcaactggccgaggaggccggatttccagaagtggcacgcatggttcgtgagtag

SEQ ID NO: 344532 - DNA, 1071 bp, Artificial Sequence
  derived and/or modified sequence
atgagtcgccctcttctgatcaccttcacccccgcaaccgacccgtcggacctctggaaggatggacaacagcagccgcagcctgagaaaccagagtcaaccctcgacggcgctgccgcactggccttctatgaggccctcataggcgacgaatcctccgctcccgactctcagcgcagccagaccgagcccgctagagagcggaaacgcaaaaaacgcagaataatgaaggcaccagccgcagaagctgtcgccgagggagcgagcggtcggcatggacagggacggtctctcgaggcggaagacaagatgactcatcggatactgagagccgcacaagaaggtgacctgccggaactgaggaggctcctggagcctcatgaggcaggaggtgccggagggaatattaacgctagagacgctttctggtggactcccctgatgtgcgccgctagggcgggacaaggggcagcagtgagctacctgctggggagaggggctgcctgggttggcgtgtgcgaactatctggaagggatgctgcccagctggcagaagaggcaggctttcccgaggtcgcacggatggtaagagaatctcacggtgaaacccgttcacctgaaaacaggtctccaactcccagtttgcagtactgcgagaattgcgacacacattttcaggactctaaccaccgcaccagtacggcccatctgttatccttaagccagggaccacaaccccctaacttaccgctgggcgttccgatctccagtccagggttcaagctcctgctgaggggtggctgggagcctgggatgggtctagggcctcggggtgagggccgagctaatccaatccccactgttctgaagagggatcaggagggcttaggatatcgatccgcccctcagcctagggtgacacactttcccgcatgggatacacgtgccgtcgccggaagagaacggcctccccgtgtggcgactctgtcctggcgggaggagcggaggcgcgaggaaaaagatagagcttgggagagggacctgagaacctatatgaatctcgagttttag

SEQ ID NO: 344533 - DNA, 597 bp, Artificial Sequence
  derived and/or modified sequence
atgtctaggccgctccttatcaccttcaccccagccactgacccaagtgatctctggaaagatggacagcagcagcctcagcctgagaagcccgaaagtactctcgatggcgcagcggctctggccttctatgaggcattaatcggagatgaatcatctgcgcctgactctcaacgtagtcaaaccgagcctgcccgtgagaggaagcggaaaaagaggcgaatcatgaaagcccctgccgcagaggctgtggcggagggtgcgtcagggcgacacgggcagggtaggtccttagaagcagaggacaaaatgacacacagaatactcagggccgctcaggagggggatctccctgaactccggcgactgctggagccccacgaggccggaggcgctggaggtaatattaacgcacgagatgccttctggtggactccactcatgtgcgctgcccgtgctggccaaggtgctgctgtgtcttacctactgggacgcggagccgcttgggttggcgtctgtgaattatctggccgagacgccgcacagttggccgaagaagctggatttccggaggtagctcgcatggtgagggagtag

SEQ ID NO: 344534 - DNA, 1071 bp, Artificial Sequence
  derived and/or modified sequence
atgtcgcgccctcttcttattacatttacccctgccacggatccctctgatctctggaaagatggacagcagcagcctcagcccgaaaagccagagagtaccctggacggggctgctgcccttgccttttacgaggcccttattggcgatgaatctagtgcccctgactcccagaggtcccaaacggaaccagcgagggaacgcaaacgcaaaaaacggagaatcatgaaggcgccagcggctgaagcagttgctgagggcgcaagtggtagacacggacagggacgctctttagaagcagaggataagatgacccatcgcatccttagagcagcacaggaaggcgatctgcctgagctccggaggttacttgaaccccacgaagcgggtggcgctggcggaaatattaacgctcgtgatgctttttggtggacccctctgatgtgcgctgccagggctggacagggcgctgccgtcagctatctgctcgggcgaggtgctgcctgggttggtgtgtgcgagttatccgggagggacgccgctcagctggcagaagaggccggattcccggaggtggcgagaatggtccgtgagtcccatggggaaacccgaagtccggaaaatcgtagcccaaccccttctctccagtactgcgagaattgcgacacgcacttccaggatagcaaccacaggacttctacagcgcacctgctctctttgtctcagggacctcagccccctaacttgcctctcggagtccctatctcttcaccaggatttaaactcctgttgcgtgggggatgggaaccgggtatgggcttgggccctagaggggaagggagagccaacccaataccaaccgtgctcaaacgggatcaagaggggctgggatatagatccgcaccgcagcctagggtgacccatttccccgcttgggatacaagagcagttgcgggacgcgagcggcctcccagagtggcaacactcagctggcgcgaggaaagacgcagagaagagaaggatcgtgcctgggaaagggatctgcgcacctatatgaaccttgaattttag

SEQ ID NO: 344535 - DNA, 1071 bp, Artificial Sequence
  derived and/or modified sequence
atgagccgcccattactcatcaccttcactcccgctacagacccctcagatctgtggaaggatggtcagcagcagccacagcccgagaaacctgaaagtacactcgacggggctgccgctctggctttttacgaggctctgataggagatgagagtagcgcccctgattctcagcgatcacagactgaacccgcacgagagcgaaagaggaagaagcgtagaataatgaaggcacccgcagccgaggcagtagctgaaggcgcaagcgggaggcacggtcaaggccgttctctcgaggccgaggataagatgacacatcggatcttgcgcgctgctcaggaaggtgatcttcccgagctcagaaggttgctggaaccccacgaggccggaggcgctggaggaaatattaatgcacgcgacgccttctggtggacacctctcatgtgtgccgctcgggctggccagggcgctgccgttagctacttactgggacgaggcgctgcttgggtcggtgtgtgcgaactgtccgggcgtgacgcagcccagttggctgaagaggcgggatttccggaggtcgcccgaatggtccgggagagccatggagagacccgttcccccgaaaatcggagccccaccccttcactccagtattgtgagaactgtgacacccacttccaggatagcaatcacagaacctcaacagctcacctcctgagtctctctcagggtccccaaccacccaacctgcctttaggtgtccctattagttctccagggttcaagctcctgctgagagggggatgggaacccggaatgggtctgggcccaagaggcgaaggtcgagctaatccaatccctactgtgcttaagagagaccaggaggggcttggctatcggtccgcaccccagcctcgcgttacacacttccccgcttgggacactcgggcagtcgccggaagggaacgaccgcctcgtgtcgctacgctgagctggcgcgaagaaagacggagagaggagaaagatcgagcttgggagcgagatttgaggacatacatgaacctggaattctag

SEQ ID NO: 344536 - DNA, 1071 bp, Artificial Sequence
  derived and/or modified sequence
atgagtcgtcccctgctgatcactttcacgcccgcaacagacccatcagatttatggaaagatggccaacaacagccacagcctgaaaagcctgagtcaactctcgatggggctgccgcactcgctttttacgaggctctgattggcgacgaatcctccgcgccagacagccagagatctcagactgagcctgcacgagaacgcaagaggaagaagagacgaattatgaaggcacccgctgccgaggcggtggcggagggtgctagcggacggcatggacaaggacgctcactagaggctgaagataagatgacccacaggattctgcgggcagcccaggagggggacctcccagagcttcgtcgcctgttggagccgcacgaggcagggggagctggtgggaacatcaatgcaagagatgccttttggtggaccccgcttatgtgtgctgcccgagctggccaaggggctgcagtgtcttacctactggggagaggggcagcctgggttggggtctgcgagttatctggacgcgatgctgcacagctggcggaggaggccggattcccagaggtcgcgaggatggtgagagaatcccatggggaaacaagaagccctgagaatcgaagtcccacaccatccctgcagtattgtgaaaactgcgatactcactttcaggactccaatcacagaaccagcaccgctcatttactgtctctgtctcagggccctcaaccacccaatctcccacttggagtgcctatatcaagccccggatttaagttgctcttacgtggaggatgggagccaggtatgggcctggggccacgcggtgaagggcgtgcgaatccgatacctaccgtgctgaaaagggaccaggagggacttggctaccgctctgcacctcagccgagagtgacacactttcccgcttgggacacccgtgctgtcgctggcagagagcgtcctcccagggtggctactctctcttggcgggaggaacgaagaagagaggagaaagaccgtgcatgggagcgcgatctccgtacctacatgaacttggagttttag

SEQ ID NO: 344537 - DNA, 273 bp, Artificial Sequence
  derived and/or modified sequence
atgtcccggcctctgctcatcaccttcactcctgcaacagacccaagcgacttgtggaaggacggccagcagcagcctcagcctgagaagcccgagagcacactggatggcgctgccgcacttgctttttatgaagccctgatcggtgacgaaagctccgcaccagattcccagcggtctcagaccgaacctgcacgtgaacggaaacgtaaaaaaaggagaatcatgaaggccccagcggcagaagccgttgctgagggtgcctccggctag

SEQ ID NO: 344538 - DNA, 273 bp, Artificial Sequence
  derived and/or modified sequence
atgtcccgccctctgctcattacctttacgcctgctactgatccatccgacttgtggaaggatggacagcagcaaccccagcccgagaagcccgagagcacgctggatggcgctgcagcccttgccttctacgaagcactgatcggcgacgaatcttctgcccctgacagccagcgatctcaaaccgaacctgcacgcgagcggaaaaggaaaaaaaggcggataatgaaggctccggctgccgaggctgtggcagagggcgcatctggttag

SEQ ID NO: 344539 - DNA, 324 bp, Artificial Sequence
  derived and/or modified sequence
atgtcaagacctttgctaatcactttcactccagcgactgatccgagcgacttatggaaggatggacagcaacagccacagccagagaagccggaatccaccctagacggggcagccgctctggcgttttacgaggccctgataggcgacgaaagctcagccccagatagtcagaggagtcagacggagcctgcgagagaacggaagcgcaagaagcgtagaattatgaaagcccctgcagccgaagccgtagccgagggcgcatctggacgacacggacaaggtcggtccctggaggcagaggacaagatgacacatcgatag

SEQ ID NO: 344540 - DNA, 324 bp, Artificial Sequence
  derived and/or modified sequence
atgtctcgcccactgttgatcaccttcacccctgccactgaccctagtgatctctggaaggatggccagcagcagccacagcctgagaaaccagagtctacactggacggtgccgctgccctggctttttacgaggcactcatcggagatgagtcgtccgcgcctgacagccaacgaagccagaccgagcctgctagggagcgcaagcgtaaaaagaggagaatcatgaaggcccctgcagccgaggctgtcgctgaaggcgctagcggcaggcacggacaagggagatcactcgaggctgaggataaaatgacccacagatag

SEQ ID NO: 344541 - DNA, 1071 bp, Artificial Sequence
  derived and/or modified sequence
atgagtcgaccccttctgatcacatttacccctgccacagatccgtccgacttatggaaggacgggcagcagcagcctcagccagaaaaaccagagagcactctagatggggctgcagctctcgccttctacgaagctctcattggtgacgaaagttcagcaccggattcacaacgctcccaaactgagcctgccagggagcggaaaaggaagaagaggaggatcatgaaggcccctgctgcggaagcggtcgccgagggcgctagcggacgccatggtcagggaagaagtctggaggccgaggacaagatgacacataggatcctgcgggctgcacaagagggcgaccttccagagctgcgaagattactggaaccacacgaagccggaggcgctggaggaaacatcaatgcgagagacgctttttggtggacaccgctgatgtgtgccgctagggccggacaaggggcagctgtgtcgtacttattgggcagaggggcagcctgggtgggggtgtgcgagctgagcggtcgcgatgctgctcagttagcagaggaggccggatttccagaggttgcgcgaatggtaagggaatctcacggagagactagatctcccgagaaccgctctcctacccctagtctgcagtattgcgagaattgcgatacgcattttcaggactctaatcaccgaaccagcactgcacacctgctgtccttgtcccaaggcccacagccccctaatctccctttgggtgtacccataagctcccctgggtttaagttgttactgcgtggaggctgggagcctggaatgggcctagggcctcggggagaaggccgagcaaacccaattcctacggtcctaaagcgagaccaggagggactcggctatcgctccgctcctcaaccacgcgttacccatttcccagcgtgggataccagagccgtggcgggtcgcgagaggccccctcgagtggctacactgagctggcgtgaagagcgtcgaagagaagagaaggacagagcttgggagcgcgatctccgcacatacatgaatctggaattctag

SEQ ID NO: 344542 - DNA, 498 bp, Artificial Sequence
  derived and/or modified sequence
atgtcgcggcctctcctcattactttcacgccggcaacggacccatcagacttatggaaagatggacagcagcagccgcagcctgaaaagcccgaaagcacactggacggggctgccgcattggctttctacgaggcactgattggggacgaaagtagcgctccagattctcaacggagccagacagaacctgctagagaacgcaaaagaaagaagaggagaattatgaaggcccctgcagcagaagcagtggctgagggcgctagcggcagacatgggcagggacgctcactggaggcggaggacaaaatgactcatcggattctcagggcggctcaggaaggagacctgcccgagctgaggagactgctggaaccacatgaggccggaggggctggtgggaacattaatgcacgagatgccttctggtggacaccactgatgtgtgccgcacgggcaggtcagggcgcagccgtatcgtacttactggggcgttag

SEQ ID NO: 344543 - DNA, 1071 bp, Artificial Sequence
  derived and/or modified sequence
atgtccagaccactgttgattaccttcaccccagctaccgaccctagcgatctgtggaaagatggacagcaacagcctcagccagaaaaaccggagagcacattggacggcgcagccgctctggcattttatgaagcactgattggggatgaaagcagtgctcccgattcgcaacgctctcagaccgaacccgctcgcgagaggaagagaaaaaagcggaggatcatgaaggcccctgccgcagaggctgtggccgaaggcgcaagcggcaggcatgggcaaggcaggtccctcgaagccgaggataaaatgacgcatagaatcttaagagctgcccaggagggagatctgccagaactgagacgactgctggagccacacgaagcaggaggggcagggggaaacattaacgctcgcgatgccttttggtggacaccgctgatgtgtgccgcacgcgcaggtcaaggtgccgctgtgagctacctgctgggcagaggtgctgcgtgggtgggcgtgtgtgagctcagcggacgagacgcggctcagctcgctgaagaggcaggctttcccgaggtggcccgtatggtccgggaatcgcacggggaaacccggtcccccgagaataggagtccgacacctagcttgcagtattgtgagaactgcgacactcacttccaagattctaatcaccgtacgtcaacagctcaccttttgagcctctctcagggtccccagcctcctaacctgcctctcggcgttcctatcagtagccctggcttcaaactgcttttaagggggggttgggaacctggaatgggacttggaccacgaggcgagggtcgagccaatccaatcccaaccgttctcaagagggatcaggagggtttgggatatagatccgcacctcagcctcgcgtgacccattttcccgcttgggacactcgcgcagttgccggacgggaaaggcccccacgagtcgcaaccttatcttggcgagaagaaaggaggcgagaggaaaaagatagggcgtgggaaagagacctccgtacctatatgaaccttgagttctag

SEQ ID NO: 344544 - DNA, 1071 bp, Artificial Sequence
  derived and/or modified sequence
atgagccggccactgttgatcacatttacacctgctactgacccctccgacctgtggaaggacggacagcaacagccccaaccagagaagccggagagtacccttgacggggctgcagcactggccttctacgaggctttaatcggcgatgagagttcagctcccgattctcagcgtagccaaactgagcctgccagggagcgaaagcggaagaagcgcaggattatgaaagcccctgccgctgaggcagtagctgagggcgctagtggtcgtcatggccagggtaggagtcttgaggccgaagacaaaatgacgcaccgcattttaagagccgcacaggaaggtgatctgcccgaattgagaaggttgttagaaccccacgaggccggaggcgctggaggtaatattaatgcaagggacgcgttctggtggacccctcttatgtgtgccgcaagagctggacagggggctgcagtttcctacttgctcggacgtggagctgcctgggtgggcgtgtgcgagctgtccggcagggacgccgctcagctcgccgaggaggcaggattccctgaggtagcaaggatggtgcgggaatcccatggagagaccaggtctcccgagaatcgtagccccactcccagtttacagtactgcgaaaactgtgatacccacttccaggactcgaaccaccgcacatctactgctcatttgcttagcttatcgcaagggcctcagcctcctaatctccctcttggggtccccataagcagcccgggattcaagttgctgctcagaggaggatgggaacctggaatgggcttgggcccaagaggtgaagggagggccaatcccatacccactgtcttgaagcgagatcaggaaggactcgggtataggagcgccccacagccgcgagtaacacatttccctgcttgggacactagagcagtcgccggacgcgaaaggcccccacgggtcgccaccctgtcctggcgggaagagagaagacgggaggaaaaggatcgggcatgggaaagagacctgcggacatacatgaatctggaattctag

SEQ ID NO: 344545 - DNA, 1071 bp, Artificial Sequence
  derived and/or modified sequence
atgtcccgccctctcttgatcacattcacacctgctaccgacccctccgacctgtggaaagacggccagcagcagccacagccggagaagcctgaatcgactttggatggtgccgctgcattggccttctacgaggccctgatcggtgacgaaagttcggctccggactcacaaagatcccaaactgagcccgctcgggagaggaagcgtaagaaaagaagaatcatgaaggcgcctgccgcagaagccgttgccgagggtgccagcggaagacatgggcagggaagaagcctcgaagctgaagataagatgactcataggattctgcgggctgcacaggagggggatttaccagagcttagaagactactagagccccacgaggcaggcggagccggtggaaatataaacgcgcgtgacgctttttggtggactcctctgatgtgtgccgcacgcgcaggacaaggcgcagcagtatcttacctccttggtagaggagcagcctgggtgggcgtgtgcgagttatccggacgggatgctgcacaactggccgaggaagctggattccccgaggtcgctagaatggtcagagaaagtcacggggaaactaggtctccagaaaaccggtcccccactccttccctgcagtattgtgagaactgcgacactcacttccaggattctaatcacaggacaagtacagcccatctcctcagtctgtctcaaggcccacagccccctaacctgcccctcggagtccccatcagctctcctggattcaaattgctcctgagaggcggttgggaacccggaatggggctgggccctcgtggggagggccgtgccaatcccatacctaccgttctgaagagggatcaagagggcctgggttacaggagtgctccccaacctcgtgtgacccactttccagcctgggatacccgtgcagtggccggtagagagcggccaccgagggtggcgacactgagctggcgcgaggagcggagaagggaggaaaaagacagagcttgggaaagggatttgcggacctacatgaacctggaattctag

SEQ ID NO: 344546 - DNA, 1071 bp, Artificial Sequence
  derived and/or modified sequence
atgagcagacccctgctgatcaccttcacccccgccaccgaccccagcgacctgtggaaggacggccagcagcagccccagcccgagaagcccgagagcaccctggacggcgccgccgccctggccttctacgaggccctgatcggcgacgagagcagcgcccccgacagccagagaagccagaccgagcccgccagagagagaaagagaaagaagagaagaatcatgaaggcccccgccgccgaggccgtggccgagggcgccagcggcagacacggccagggcagaagcctggaggccgaggacaagatgacccacagaatcctgagagccgcccaggagggcgacctgcccgagctgagaagactgctggagccccacgaggccggcggcgccggcggcaacatcaacgccagagacgccttctggtggacccccctgatgtgcgccgccagagccggccagggcgccgccgtgagctacctgctgggcagaggcgccgcctgggtgggcgtgtgcgagctgagcggcagagacgccgcccagctggccgaggaggccggcttccccgaggtggccagaatggtgagagagagccacggcgagaccagaagccccgagaacagaagccccacccccagcctgcagtactgcgagaactgcgacacccacttccaggacagcaaccacagaaccagcaccgcccacctgctgagcctgagccagggcccccagccccccaacctgcccctgggcgtgcccatcagcagccccggcttcaagctgctgctgagaggcggctgggagcccggcatgggcctgggccccagaggcgagggcagagccaaccccatccccaccgtgctgaagagagaccaggagggcctgggctacagaagcgccccccagcccagagtgacccacttccccgcctgggacaccagagccgtggccggcagagagagaccccccagagtggccaccctgagctggagagaggagagaagaagagaggagaaggacagagcctgggagagagacctgagaacctacatgaacctggagttctag

SEQ ID NO: 344547 - DNA, 459 bp, Artificial Sequence
  derived and/or modified sequence
atgagcagacccctgctgatcaccttcacccccgccaccgaccccagcgacctgtggaaggacggccagcagcagccccagcccgagaagcccgagagcaccctggacggcgccgccgccctggccttctacgaggccctgatcggcgacgagagcagcgcccccgacagccagagaagccagaccgagcccgccagagagagaaagagaaagaagagaagaatcatgaaggcccccgccgccgaggccgtggccgagggcgccagcggcagacacggccagggcagaagcctggaggccgaggacaagatgacccacagaatcctgagagccgcccaggagggcgacctgcccgagctgagaagactgctggagccccacgaggccggcggcgccggcggcaacatcaacgccagagacgccttctggtggacccccctgatgtgcgccgccagatag

SEQ ID NO: 344548 - DNA, 498 bp, Artificial Sequence
  derived and/or modified sequence
atgagcagacccctgctgatcaccttcacccccgccaccgaccccagcgacctgtggaaggacggccagcagcagccccagcccgagaagcccgagagcaccctggacggcgccgccgccctggccttctacgaggccctgatcggcgacgagagcagcgcccccgacagccagagaagccagaccgagcccgccagagagagaaagagaaagaagagaagaatcatgaaggcccccgccgccgaggccgtggccgagggcgccagcggcagacacggccagggcagaagcctggaggccgaggacaagatgacccacagaatcctgagagccgcccaggagggcgacctgcccgagctgagaagactgctggagccccacgaggccggcggcgccggcggcaacatcaacgccagagacgccttctggtggacccccctgatgtgcgccgccagagccggccagggcgccgccgtgagctacctgctgggcagatag

SEQ ID NO: 344549 - DNA, 273 bp, Artificial Sequence
  derived and/or modified sequence
atgagcagacccctgctgatcaccttcacccccgccaccgaccccagcgacctgtggaaggacggccagcagcagccccagcccgagaagcccgagagcaccctggacggcgccgccgccctggccttctacgaggccctgatcggcgacgagagcagcgcccccgacagccagagaagccagaccgagcccgccagagagagaaagagaaagaagagaagaatcatgaaggcccccgccgccgaggccgtggccgagggcgccagcggctag

SEQ ID NO: 344550 - DNA, 324 bp, Artificial Sequence
  derived and/or modified sequence
atgagcagacccctgctgatcaccttcacccccgccaccgaccccagcgacctgtggaaggacggccagcagcagccccagcccgagaagcccgagagcaccctggacggcgccgccgccctggccttctacgaggccctgatcggcgacgagagcagcgcccccgacagccagagaagccagaccgagcccgccagagagagaaagagaaagaagagaagaatcatgaaggcccccgccgccgaggccgtggccgagggcgccagcggcagacacggccagggcagaagcctggaggccgaggacaagatgacccacagatag

SEQ ID NO: 344551 - DNA, 597 bp, Artificial Sequence
  derived and/or modified sequence
atgagcagacccctgctgatcaccttcacccccgccaccgaccccagcgacctgtggaaggacggccagcagcagccccagcccgagaagcccgagagcaccctggacggcgccgccgccctggccttctacgaggccctgatcggcgacgagagcagcgcccccgacagccagagaagccagaccgagcccgccagagagagaaagagaaagaagagaagaatcatgaaggcccccgccgccgaggccgtggccgagggcgccagcggcagacacggccagggcagaagcctggaggccgaggacaagatgacccacagaatcctgagagccgcccaggagggcgacctgcccgagctgagaagactgctggagccccacgaggccggcggcgccggcggcaacatcaacgccagagacgccttctggtggacccccctgatgtgcgccgccagagccggccagggcgccgccgtgagctacctgctgggcagaggcgccgcctgggtgggcgtgtgcgagctgagcggcagagacgccgcccagctggccgaggaggccggcttccccgaggtggccagaatggtgagagagtag

SEQ ID NO: 344552 - DNA, 93 bp, Artificial Sequence
  derived and/or modified sequence
atggggtccaggaatagtagcagtgccggtagtgggtctggcgaccccagcgaggggctgccccgacggggagcaggactgcggaggtcttag

SEQ ID NO: 344553 - DNA, 348 bp, Artificial Sequence
  derived and/or modified sequence
atgcccgccacccccagcctgaaggtggtgcacgagctgcccgcctgcaccctgtgcgccggccccctggaggacgccgtgaccatcccctgcggccacaccttctgcagactgtgcctgcccgccctgagccagatgggcgcccagagcagcggcaagatcctgctgtgccccctgtgccaggaggaggagcaggccgagacccccatggcccccgtgcccctgggccccctgggcgagacctactgcgaggagcacggcgagaagatctacttcttctgcgagaacgacgccgagttcctgtgcgtgagcgagtgcagaaccaccgacggcttcggctgcgcctag

SEQ ID NO: 344554 - DNA, 348 bp, Artificial Sequence
  derived and/or modified sequence
atgccagccaccccctctctcaaggtcgtgcatgaactgcctgcatgtactctgtgtgcaggcccgttggaagacgccgtgaccattccatgtggccatactttttgtagattatgcttgccagccttgagtcagatgggtgcccaaagctcagggaaaatattgctgtgccctctttgccaagaggaagaacaggctgagacccccatggcacccgtgccactgggtccattaggagaaacttactgcgaagagcacggtgaaaagatctactttttttgcgagaatgacgctgagtttctgtgtgtgtcagagtgccgcaccaccgacggatttggttgcgcatag

SEQ ID NO: 344555 - DNA, 348 bp, Artificial Sequence
  derived and/or modified sequence
atgcccgcgaccccaagcctcaaagtggtccatgagcttccagcctgtaccctgtgtgctggtccactggaagatgcagtaaccataccgtgcggacacactttctgtagactctgcctgccagccctgagccaaatgggcgcccagtccagtgggaagattctcctatgtcccctgtgccaggaagaagagcaggccgagacccccatggccccggttccactcggaccacttggagagacctactgcgaggaacatggagagaaaatctatttcttttgcgaaaacgacgcggaattcctctgcgtcagcgaatgtcggaccacagatggcttcgggtgcgcgtag

SEQ ID NO: 344556 - DNA, 348 bp, Artificial Sequence
  derived and/or modified sequence
atgcccgctaccccctcccttaaagtcgttcacgaactgcctgcctgtaccttgtgtgccggacccctagaggacgccgttactattccttgcggccataccttctgcagactgtgtttgccagccctctctcaaatgggtgcccagagcagtggcaagatcttgctctgccccctctgccaggaagaagagcaagctgagacccctatggctcctgttcctctcggacccttaggtgagacatattgtgaggagcatggtgaaaagatttattttttctgtgaaaacgatgcagagtttctgtgcgtcagtgagtgtcggactacagatggcttcggctgcgcgtag

SEQ ID NO: 344557 - DNA, 348 bp, Artificial Sequence
  derived and/or modified sequence
atgccagccacaccgtcactgaaggtggtccatgagctgcctgcctgcaccctttgcgcaggccctctggaagatgccgtgacaatcccctgtggtcatactttttgtagactgtgcttgcccgcccttagtcaaatgggagcccagagtagcggtaagatacttctctgccccctatgtcaggaagaagagcaggcagagacacccatggctcccgtgcccttgggtcccctcggggaaacttattgtgaggagcacggggagaagatttactttttttgtgagaatgatgcggagtttctgtgcgtgtctgagtgcagaacgaccgatgggtttggttgcgcctag

SEQ ID NO: 344558 - DNA, 348 bp, Artificial Sequence
  derived and/or modified sequence
atgcccgccacaccctccctgaaagtcgtgcatgagttaccagcgtgtaccctttgcgccgggcccctagaagatgccgttacgatcccctgtggccataccttttgtcggctctgtctgcctgccctctcccagatgggtgcgcagagctctggtaaaatcctgctgtgtccactgtgtcaggaggaggaacaagcagagactccaatggcgcccgtcccattggggccgctcggcgaaacatattgtgaagagcatggagagaaaatctactttttctgtgaaaatgatgctgagttcctgtgcgtgtccgagtgccgaaccaccgatgggtttgggtgtgcttag

SEQ ID NO: 344559 - DNA, 348 bp, Artificial Sequence
  derived and/or modified sequence
atgccagccactccctctctgaaagtcgtgcatgagctgccagcctgtacactttgcgcaggcccattagaagatgctgtgacaatcccctgtggccacacattttgtagactgtgtctccccgcgctgagtcagatgggcgcacaaagctctggcaagatcttgctgtgtccactctgccaggaggaggagcaggccgagacacccatggccccagtccctttgggtccccttggagagacatattgtgaggagcacggagaaaaaatctacttcttctgcgagaatgatgccgaatttctctgtgtttctgagtgccggactacagacgggtttggttgcgcctag

SEQ ID NO: 344560 - DNA, 348 bp, Artificial Sequence
  derived and/or modified sequence
atgccagccaccccaagccttaaggttgttcatgaactgcccgcatgcactctttgcgctggccctttggaagatgccgtgacaatcccctgcggacacacgttctgcaggctctgtctgcccgccctgtcccagatgggcgcccaatcaagcggcaaaatcctgttatgccccttgtgccaggaggaggagcaggcagagacgccgatggcaccggtcccactaggtcccttaggcgaaacttactgcgaagagcacggcgagaaaatttactttttctgtgagaacgacgctgagttcctgtgtgtgtcggagtgtcgtacgactgatggcttcggatgtgcgtag

SEQ ID NO: 344561 - DNA, 348 bp, Artificial Sequence
  derived and/or modified sequence
atgcccgccacgccgtcactgaaagtcgtccacgaactgcccgcttgcaccctgtgcgcgggccctctcgaggatgccgttaccatcccttgcggccatacattttgtcggttgtgtcttcccgccttgtcgcaaatgggagcgcagtcgtcgggaaagatcctcttatgccccttgtgtcaggaagaagagcaggccgaaaccccaatggcccccgtgcctcttgggcccctaggggagacttattgcgaagagcacggcgagaagatctacttcttttgcgagaatgacgctgaattcctgtgcgtctcggaatgtcggacaaccgacggctttggctgcgcctag

SEQ ID NO: 344562 - DNA, 348 bp, Artificial Sequence
  derived and/or modified sequence
atgcctgccacccccagcctgaaggtggtgcatgagctgcctgcctgcaccctgtgtgccggccccctggaggatgctgtgaccatcccctgtggccacaccttctgccgcctgtgcctgcctgccctgagccagatgggcgcccagagcagcggcaagatcctgctgtgccccctgtgccaggaggaggagcaggccgagacccccatggcccctgtgcccctgggccccctgggggagacctactgtgaggagcacggggagaagatctacttcttctgtgaaaatgatgctgagttcctgtgtgtgtctgaatgtaggaccacagatggcttcggctgtgcctag

SEQ ID NO: 344563 - DNA, 348 bp, Artificial Sequence
  derived and/or modified sequence
atgcccgccacccccagcctgaaggtggtgcacgagctgcccgcctgtactctctgtgccggacccttggaggatgcagtgaccattccatgtggacacacattttgcagactgtgtctaccagctctgagccaaatgggagcccagtcatccggcaagattctgctgtgccccctgtgtcaggaggaagagcaggccgagactcccatggctcccgtccctctggggccgttgggagagacctattgcgaggaacatggcgagaaaatttacttcttctgcgagaacgatgccgagttcctctgcgtgagtgagtgtaggactactgatggatttggctgtgcatag

SEQ ID NO: 344564 - DNA, 348 bp, Artificial Sequence
  derived and/or modified sequence
atgcccgccacccccagcctgaaggtggtgcacgagctgcccgcctgtacactatgtgccggacctctggaggacgcagttactattccgtgcggacataccttctgtcggttatgccttccggctttatcgcagatgggtgcgcagtcaagcggaaaaatacttttatgccccctctgtcaagaagaagaacaggcggagaccccaatggcccctgtgcccctcggaccgctgggcgagacttactgtgaagaacacggcgaaaagatctatttcttttgtgagaacgacgccgaatttttatgcgtatccgagtgcagaaccacagacggattcggctgtgcttag

SEQ ID NO: 344565 - DNA, 348 bp, Artificial Sequence
  derived and/or modified sequence
atgcccgccacccccagcctgaaggtggtgcacgagctgcccgcctgcacactttgtgccggccctctggaggacgctgtgactatcccgtgtggtcataccttctgtagactgtgtctccccgccctgtctcaaatgggtgcacagtcctccggtaagatccttctgtgtcccctttgtcaggaggaggaacaagccgaaacccctatggccccagttccgctggggcccctgggcgaaacttactgcgaagaacacggagaaaagatctattttttttgtgaaaacgatgctgaattcctttgcgtctcagagtgtagaacaaccgacggcttcggatgcgcctag

SEQ ID NO: 344566 - DNA, 348 bp, Artificial Sequence
  derived and/or modified sequence
atgcccgccacccccagcctgaaggtggtgcacgagctgcccgcctgtacactatgcgcaggacctctcgaggacgccgttactattccatgcggccacacgttttgtaggctctgcctacccgctttgagtcaaatgggggcccagtcatctgggaagatcctgctatgccctctgtgccaggaggaggaacaggccgagacacctatggcccccgtgcccctggggcctctgggagagacatattgcgaggagcatggcgaaaaaatctacttcttttgcgagaatgacgccgagtttctgtgcgtgagtgaatgtcggacaacggatggttttggatgcgcttag

SEQ ID NO: 344567 - DNA, 348 bp, Artificial Sequence
  derived and/or modified sequence
atgcccgccacccccagcctgaaggtggtgcacgagctgcccgcctgcactctgtgcgctggcccactggaggacgcagttacgatcccttgtggacatacattttgcaggttgtgcctgcctgccctcagtcaaatgggagctcagagctctgggaaaatcctgttgtgtcccctctgccaggaagaggaacaagccgaaacgcctatggctccagtacccctgggccccctcggcgagacctactgtgaggagcacggtgaaaaaatttacttcttttgcgagaacgacgctgagtttctctgtgtaagcgagtgtcgaaccacagatgggtttggctgcgcttag

SEQ ID NO: 344568 - DNA, 348 bp, Artificial Sequence
  derived and/or modified sequence
atgcccgccacccccagcctgaaggtggtgcacgagctgcccgcctgtactttgtgtgccggccctctggaggacgccgtgaccatcccgtgcgggcataccttttgtaggttatgtcttcctgctctgtcccagatgggcgcacagagcagcggaaagatcttgctctgtcccttatgccaggaggaggaacaggccgagacccccatggcacccgtccccctcggacctctgggtgagacctattgtgaagaacacggtgagaagatttatttcttttgtgagaacgacgccgagtttctgtgcgtgtcggagtgtaggacaactgatggatttggctgtgcctag

SEQ ID NO: 344569 - DNA, 348 bp, Artificial Sequence
  derived and/or modified sequence
atgcccgccacccccagcctgaaggtggtgcacgagctgcccgcctgcacattgtgtgcgggtccactggaagacgctgtcacaatcccttgtgggcacactttttgcagattgtgtctgccagccctgtcacagatgggagcccaaagttctggaaagattctcctctgtcccttgtgccaagaagaggaacaggcggagacaccaatggccccagtaccccttgggcccttgggggagacatattgtgaagagcacggggaaaagatatattttttctgtgaaaatgatgccgaattcctctgcgttagtgagtgtcgcactaccgatggtttcggatgtgcttag

SEQ ID NO: 344570 - DNA, 348 bp, Artificial Sequence
  derived and/or modified sequence
atgcccgccacccccagcctgaaggtggtgcacgagctgcccgcctgcactctatgtgctgggcccctggaagatgcagtgaccatcccttgcggccacacattctgtcggttgtgtctcccagctctcagccagatgggtgcccagtccagcgggaagatcctgttatgcccactgtgtcaggaggaggagcaggccgaaactcccatggcaccggtgccactcggcccccttggagagacatactgcgaagagcatggcgagaagatctactttttctgtgagaacgacgcagagttcctgtgtgtctcagaatgccgaaccaccgatggttttgggtgtgcatag

SEQ ID NO: 344571 - DNA, 348 bp, Artificial Sequence
  derived and/or modified sequence
atgcctgcaactccgtctttaaaggtcgtgcacgagctgcctgcctgtactctgtgtgcgggaccattggaagacgctgtgacgattccctgtggtcacactttttgcaggctctgcctgccggctctgagccagatgggcgctcagtccagcggcaagattctcctctgtcccttgtgccaggaggaggagcaggccgaaactcccatggcccctgtgcctctgggtccacttggcgagacatattgtgaggaacatggcgaaaagatctactttttctgtgagaacgacgcagagtttctatgcgtgtcagaatgtaggaccacggacgggtttggctgtgcttag

SEQ ID NO: 344572 - DNA, 348 bp, Artificial Sequence
  derived and/or modified sequence
atgccagccacgccttctttgaaggtggtccacgaattacctgcttgtacattgtgcgccggtcccctagaggacgctgtgacaattccttgtggccacaccttttgtcgcctctgcttaccagctctttcacagatgggcgcacaatcatcgggaaaaatactactctgtcccctgtgtcaagaggaggagcaagctgagacccccatggcaccagtgccattgggaccactgggtgagacttattgtgaagagcacggggagaaaatctattttttttgcgagaatgatgctgagtttctttgcgtcagcgagtgtcgcaccaccgatggattcggatgtgcttag

SEQ ID NO: 344573 - DNA, 348 bp, Artificial Sequence
  derived and/or modified sequence
atgcctgctacccctagcctgaaggtagtgcatgaacttcctgcctgcaccctgtgtgccggtccacttgaggacgctgtcacaatcccttgtggtcatacattctgtaggctgtgtctacctgctctgtcccagatgggggctcagtcatcgggaaagatcttgttgtgcccactatgccaggaggaagaacaggcggagacgcccatggcccctgtgccacttggacctcttggagagacatactgcgaagagcatggcgagaaaatatatttcttctgcgagaatgatgctgagttcctctgtgtgtccgaatgtcggacaactgatggctttggttgcgcctag

SEQ ID NO: 344574 - DNA, 348 bp, Artificial Sequence
  derived and/or modified sequence
atgcccgctactccatccttgaaagtggttcatgaactccctgcgtgcacactgtgcgccggacctctagaggacgccgtgacaataccgtgcggacacaccttttgtaggttatgtctacccgctctatctcagatgggagcccagtcttccgggaagatcctcctttgtcccctgtgccaggaagaggagcaggccgagacccctatggcccctgtgcccctgggcccactgggagagacatactgcgaagagcacggcgagaagatatattttttctgcgagaatgacgccgaatttctctgcgtgagtgagtgcagaactactgatggcttcgggtgtgcatag

SEQ ID NO: 344575 - DNA, 348 bp, Artificial Sequence
  derived and/or modified sequence
atgcccgcaacaccttctttaaaagtggttcacgagctgcctgcttgcacactgtgcgccggacccctagaggacgccgtcacaatcccttgcggacacaccttctgcaggctgtgcctgcccgcattgagccagatgggtgcccagagctcaggaaagatccttctgtgcccactgtgccaagaagaagaacaggccgagactcccatggctcctgtccctttgggccctctcggcgaaacatactgtgaagagcacggcgaaaaaatctactttttctgcgagaatgacgccgaatttctgtgtgtgtctgagtgcaggactaccgacggctttggatgcgcctag

SEQ ID NO: 344576 - DNA, 348 bp, Artificial Sequence
  derived and/or modified sequence
atgcctgccaccccctccctcaaagtcgtccatgagctcccggcatgcactctgtgcgctggccctttagaggacgctgtgacgatcccatgtggccacaccttttgtaggctctgcctgcccgctctctcccagatgggggctcaatccagcggaaagatcttactgtgtcctctctgccaagaagaagaacaggctgagacccccatggcacctgtacccctgggccctctcggtgaaacttactgtgaagaacacggcgagaagatatactttttctgcgagaatgacgccgagttcctatgcgtttccgaatgccgcaccaccgatggcttcggatgcgcttag

SEQ ID NO: 344577 - DNA, 348 bp, Artificial Sequence
  derived and/or modified sequence
atgcctgcgacccccagtcttaaggtggtccacgagcttccagcctgtactctctgtgcaggcccactcgaagatgcagtgacgattccctgcggtcacacgttctgcaggttgtgtctcccagcgctgtcacagatgggtgcgcagtccagtgggaagatactgctgtgccccctatgtcaggaggaagaacaggcagagacacccatggcaccagtgccattggggccactgggcgaaacttattgcgaggagcacggcgagaagatctattttttttgtgaaaacgacgcagagttcctctgtgtctccgagtgccgtaccacagacgggtttggttgcgcctag

SEQ ID NO: 344578 - DNA, 348 bp, Artificial Sequence
  derived and/or modified sequence
atgcccgctaccccctcccttaaggttgttcatgaactacctgcctgcaccctgtgtgcaggaccactcgaggacgctgtcacaataccatgtggccacacgttctgcaggttgtgcctgcctgccctaagccagatgggagcccagagctcagggaagatactcctctgcccactctgccaggaagaagaacaagccgagactcccatggccccagtgccgttaggccctctgggcgagacttactgtgaagagcacggcgaaaaaatttatttcttttgcgagaatgatgcagagtttttatgtgtatcagagtgcagaaccactgacgggttcgggtgcgcctag

SEQ ID NO: 344579 - DNA, 348 bp, Artificial Sequence
  derived and/or modified sequence
atgcccgcaaccccgtccctgaaggtggtccatgagctgcctgcctgtaccctctgtgcggggccgctggaggatgcggtgaccattccctgtggacacaccttctgccggctctgcctccccgcgctctcccagatgggggcccaatcctcgggcaagatcctgctctgcccgctctgccaagaggaggagcaggcagagactcccatggcccctgtgcccctgggcccgctgggagaaacttactgcgaggagcacggcgagaagatctacttcttctgcgagaacgatgccgagttcctctgtgtaagtgaatgcagaaccacagacggcttcggctgtgcctag

SEQ ID NO: 344580 - DNA, 348 bp, Artificial Sequence
  derived and/or modified sequence
atgcccgcaaccccgtccctgaaggtggtccatgagctgcctgcctgtaccctatgtgcggggccgctggaggatgcggtgaccattccctgtggacacaccttctgccggctctgcctccccgcgctctcccagatgggggcccaatcctcgggcaagatcctgctctgcccgctctgccaagaggaggagcaggcagagactcccatggcccctgtgcccctgggcccgctgggagaaacttactgcgaggagcacggcgagaagatctacttcttctgcgagaacgatgccgagttcctctgtgtaagtgaatgcagaaccacagacggcttcggctgtgcctag

SEQ ID NO: 344581 - DNA, 348 bp, Artificial Sequence
  derived and/or modified sequence
atgcccgcaaccccgtccctgaaggtggtccatgagctgcctgcctgtaccctctgtgcggggccgctggaggatgcggtgaccattccctgtggacacaccttctgccggctctgcctccccgcgctctcccagatgggggcccaatcctcgggcaagatcctgctctgcccgctctgccaagaggaggagcaggcagagactcccatggcccctgtgcccctgggcccgctgggagaaacttactgcgaggagcacggcgagaagatctacttcttctgcgagaacgatgccgagttcctctgtgtctcagagtgcagaaccacagacggcttcggctgtgcctag

SEQ ID NO: 344582 - protein, 324 aa, Artificial Sequence
  derived and/or modified sequence
MGMEGLLQNSTNFVLTGLITHPAFPGLLFAIVFSIFVVAITANLVMILLIHMDSRLHTPMYFLLSQLSIMDTIYICITVPKMLQDLLSKDKTISFLGCAVQIFLYLTLIGGEFFLLGLMAYDRYVAVCNPLRYPLLMNRRVCLFMVVGSWVGGSLDGFMLTPVTMSFPFCRSREINHFFCEIPAVLKLSCTDTSLYETLMYACCVLMLLIPLSVISVSYTHILLTVHRMNSAEGRRKAFATCSSHIMVVSVFYGAAFYTNVLPHSYHTPEKDKVVSAFYTILTPMLNPLIYSLRNKDVAAALRKVLGRCGSSQSIRVATVIRKG

SEQ ID NO: 344583 - DNA, 1054 bp, Artificial Sequence
  derived and/or modified sequence
cccaaggagcttgtcatggaccatgggcatggagggtcttctccagaactccactaacttcgtcctcacaggcctcatcacccatcctgccttccccgggcttctctttgcaatagtcttctccatctttgtggtggctataacagccaacttggtcatgattctgctcatccacatggactcccgcctccacacacccatgtacttcttgctcagccagctctccatcatggataccatctacatctgtatcactgtccccaagatgctccaggacctcctgtccaaggacaagaccatttccttcctgggctgtgcagttcagatcttcctctacctgaccctgattggaggggaattcttcctgctgggtctcatggcctatgaccgctatgtggctgtgtgcaaccctctacggtaccctctcctcatgaaccgcagggtttgcttattcatggtggtcggctcctgggttggtggttccttggatgggttcatgctgactcctgtcactatgagtttccccttctgtagatcccgagagatcaatcactttttctgtgagatcccagccgtgctgaagttgtcttgcacagacacgtcactctatgagaccctgatgtatgcctgctgcgtgctgatgctgcttatccctctatctgtcatctctgtctcctacacgcacatcctcctgactgtccacaggatgaactctgctgagggccggcgcaaagcctttgctacgtgttcctcccacattatggtggtgagcgttttctacggggcagccttctacaccaacgtgctgccccactcctaccacactccagagaaagataaagtggtgtctgccttctacaccatcctcacccccatgctcaacccactcatctacagcttgaggaataaagatgtggctgcagctctgaggaaagtactagggagatgtggttcctcccagagcatcagggtggcgactgtgatcaggaagggctagcagggactcccacagcatcagagtggtgactgtgatcgggaaggattagcggggact

SEQ ID NO: 344584 - DNA, 10132 bp, Artificial Sequence
  derived and/or modified sequence
aggaagaagctggagacttggtccagccgggcatcagctttccggggccggcagaggaggatctagacccgcagtactcatggtcgcccacgcagcacttcaatgaggagcgctactcgcccgcgcccaggagcatgaagggcctttccggaagtcggacccagccgccgctgtgttccgggcacacgtgtggtctggcgcccccggaggactgcgagcacctgcaccacgggcccgacgcgcggccgccctacctgctgagccccgccgacagctgccccggggggcgccaccgctgctcgccgcgcagctcggtgcactcggagtgcgtgatgatgccggtggtgctgggcgaccacgtgtccagcagcaccttcccgcggatgcactacagctcgcactacgacacgcgcgacgactgcgctgtggcccacgcgggcgccaagatcaaccgcatcccggccaacctgctggaccagttcgagaagcagctgccgctgcaccgggacggcttccacacgctgcagtaccagaggacgtccgcggccgccgagcagcgcagcgagagccccgggcggatccgccacctggtacactccgtgcagaagctcttcaccaagtcgcactcgctggagggctcctccaaaagcaacgccaacggcaccaaggcggacggccgggcggacgaccaccaccacgcccaccacgccaagcacagcaagaggagcaagagcaaggagcgcaagccggagggcaagccccggcccggcatgagcagctggtggagctcggacgacaacctggacagcgacagcacctatcggacgcccagcgtgctcaaccggcaccacctgggccccgtggcccactgctaccccgacgcgctgcagagccccttcggggacctgtccctcaagacctccaagagcaacaacgacgtcaagtgctcggcctgtgaggggttggcgctgacgcccgacgccaagtacctgaagcgcagctcctggtctacgctgacggtcagccaggccaaggaggcctaccgcaagagctcgctgaacctggacaagccgctgctgcaccaggacgccaagcccgccctgaggccgtgccactacctccaggtacctcaggatgagtggggagggtaccccaccggtggcaaagatgaggagattccctgcaggagaatgagaagtgggagttacattaaagccatgggggacgaggagagcggagagtcagactccagccccaagacatcaccaaagtcggcaatcctaccagagccgctgctgaagtccatcggacagagaccgcttggagagcaccagacccagacctacctgcaagctgcaagcgatgtgcctgtgggacacagcctggaccccgctgcgaactacaactccccgaaattccgctcccggaaccagagctacatgagggccgtcagcaccctgagccaggccagctgcgtgagccaggtgagcgaggcggagatcaatgggcaattcgagtccgtgtgcgagtccgtcttcagtgaagttgaatctcaggccatggatgccctcgacctcccgggatgtttccgaacaaggagtcacagctaccttcgagccattcaagccggctactcccaagatgacgaatgtattcccatgatgacaccctctgacatcacctccaccatcaggtcaacagcagctgtctcatatacaaattacaagaaaacgcccccaccggtgccccctcggaccacctccaagcctctgatctcggtgacggcgcagagcagcaccgaatccacccaggacgcctaccaggacagccgcgcacagaggatgtccccgtggccccaggacagccgcggcctctacaactccacggacagcctggacagcaacaaggccatgaacctcgcgctggaaacggccgctgcccagcgccacctgccagagagccagagcagctctgtgcggaccagcgacaaggccatcctggtgtccaaggcggaggagctcctcaagagccgctgctcctccatcgggattcaggattctgaattcccagagcatcagccatacccaaggtcagatgtggaaacggccacagattctgacacggagagccgcggtctgcgggaataccactctgtcggggtgcaagtggaagatgagaagcgacacggacgttttaaacgttctaacagcgtcacggccgccgtccaagctgacctggagctggaggggttcccaggccacatcaccacggaggacaaaggccttcagttcggctcatccttccagcggcactccgagcccagcacccccacccagtacagcgcggtgagaactgtacggacccaggggctcttcagctatagagaagactatcggacccaagtggacacctccaccctgccccctccagacccctggctggagcccgccatcgacacggtagagactgggaggatgtctccgtgccgcagggatggctcgtggtttttgaagctgctgcacgcagagacaaagaggatggaaggctggtgcaaagagatggagagagaggcggaggagaacgacctctcggaggaaattctcggtaaaatcaggagtgctgttgggagtgcccagcttctcatgtcccagaaattccagcagttttattggctttgccaacagaatatggaccccagcgccatgccgaggccgacgtcgcaggacctggccggctactgggacatgctgcagctctccattgaggacgtcagcatgaagttcgacgagctgcagcggctgcggctcaacgactggaagatgatggagtccccggaaagaaaggaagaaagaaaggtcccgcctccaataccaaagaagcctcccaaggggaagtttcccatcacaagagaaaaatccctggacctgcccgacagacaacgccaggaagcccggaggcgcctcatggccgccaagcgagcggcgtccttccggcagaattccgcctccgagcgcgcggacagcatcgagatctacatccccgaggcccagacccggctctgagggcggaggccggcgccttcccctcgtcgcttccgctttcccggacgcttgtgcagcgcggcgccgccctggtggtttctgtctcctcctcccgctgaacacgtcctcgctcccgcgctccccgcgccccggacacagcgggacgcggccggcggcctcagagtccacggagctcgcggcgaggacgacttctgcttttgttgttgttgttgttgttcacgggtggcctggctcacacttggctctgagggacaggtgtggcgagacctgatttctcctgcgtgttctcagaggacggcgagaaatgcctctggagctggaacccagcttacattttgttatttctatttttataaattgtgtgataattagaggtaagaataacaagtaactataaacgggtgcatcccaccactccctggaggcattagacacccaagtggaaggtgctacaacctgaagcgcaggaaagaaaggcccattcccctcgcacagccgagcttttactccctgagcacgggccgctccgctcccctgctcctgtctgtctcggacagaaaacacgaggctccttgtgtcaagcttcctgtgatggaaagcgacctctccaaccaccacactccccgccgtacagttctccagaatcccaggcgatgacaagtctgaacccacgaaaatacccagcgcagcatctacacattcaaaagataagctgagtgttcccaccaggaagtcacgcgcagagaggagagtcttacggagggctgggagcttaaaaggaaaacaatgtccttacttgtaaacagttattgtattttttatttctttctaacttaaaatacgacacccagtattttctttaagtttcaccatttacgctacatgtgatttttttaatgtatgtatatatatatattctcaaattgctctatcagctgacttttcagggtatccttaaaaaaaaacacacacgaaaaacaaaagtttgcttgtttaaaatgacagttgtgatgtaaaaagtttaagaaatatgaatgtgagtggtaagtatatctcagtttaaatggtaaagaagaaatgtagtttacatttgtatttttccagaattcttttgtcctatgcagtattgctaaagtcgagaatatattccttgcctgtgttagacatgaagggaaaaagaggtcacatattgtgatttccagctgtagcattcaaaaaaaaaattggtgttcatgactctgtggtcggtgccagaggaaaataggaacgactctaattaataggctttctgtgtatataattaaatttagctgctgcaaccattgttctgacacgacttctgtttcacagttcagaccggtcttcaaaggaaaagcctgtccgatttttccatgggttccagtttcagagttctcattattactcaaagtaaaagcggactgcgatttaagatgtttccaccccaatacctggtcttccttcccggcttaaggagtaccatgtacttagccacaggcagaatagctttcgatgaccccatagcactttgtttcttcgccttgatttgcactttacaatgtccccagcccctctgcagcccgtggctggcagggcgttcgatgtgcggttggcccccagcgcgccctccagagctgcggtgtctccctgcctcattccccacatcccactgagcatgggaccattgggagcagagctgatattaaagcatgtttagcttcgaagttttacttttttaaagctgagtagttaagaattccctgtaaaaacaaaaccctgtaaattgagcctcatgtctggtatatattttaccaaacagccttaaaatatatttggaagcaaaaatcagtacgaatgtatctccttgaaaaatgcaaaaaaaaaaaaatccctgaaatattcttctataaatgaatcctatttccccagagtgttcaaggcatttttctacctaaatgaatacctaaatcttgagtagtgtacggtaatgacgcttcttcctatatccactcttattatgttaaaacaaatgtatttgcgagtattggcattttagactttaaaaatgctgtatgatttcagatgaactctgctgtttagaagtaaccacagaaaagcaaagtcagtgtacactctgagtgaaaggaaatgtaatgtggataaaggcccgccacctcctcacattggtctatctactggcagctgatacgtttaactcatttccttgagcttatacaaaacatagaaaagcaaactgttaaagtagtcaataattatttgtctcagatcccagattctatgatccctgcttaaaagaaaatgttcactgcatgtaggttgatttcttatgttttgtagactcattgttatttttcaatccccaaaagtcttggcctaaaccatccctaggggagcagattaacctaccactacattgcacagggttggtgactcgacgtggtgaatgtgcacacgccctgcctggtccgccatgttccaaagaagatgatttaatggtagaacggatacctgctgctagacctgatggaatgttacctgtccgtgttacataatcaagtgcaatatactcagttctcatgcaggtgacattctaccatgaaacgcagaagataagccatgtttctgtattgtacatgtaaagaaaaataaaactgtttatgatacttgtgttagtcactcgagctagcttatttcagccacttctagcagatcatgccatggagctcacgacgtgtgaccatttcgtcatatttaaaatataacttcaagaaaagagtaaacatccattggagaacacggctgaaaattattgtgctgttctaggaacatcatcctagagagtgtgatgttcactataaccccatacctacattccctaatgatacagccaatgacaggtgaaacccagacactctccttagagccgacaggttgatcctgctgtgttgaaggctgtggttaataaaacacaagtatgataaacaggacctagcgtttagcccgggaaaggagaatgctgcttgtcacctagagtgctttccttgtgatgcgtctctcgcatcttcacgtgttgttgtgtttgaagtaaaactagttgttatcgatgacaatttttaccatagttttctcagcaaatttatatcaccatcttagaatggtatataaaaaaattgaactgtttatgataccaaaaaaattacagttttgtttaaaaggaaatgttgatgttttcaactccaaatcaattctaaaaacttcaagcacttaatggaaaggtaaatggtcagataaaaatataattacctgtaaggttatctggttttaaaagaaaaaaaaaaagcctacaaactcagtgacctactacgcagagggaatttttccctgctgcttcttatgaaagtggccaggtttattattagaagacacagtggcagagcacacatgtgcacaggttctgattatttctcttggagcatatgtccttgtcttgatttttgccttttcgatgccatattaagcagccaccgtttccacccctttcattagaaggccctgcatccgtaaattcgcgcatctctgtttttgttagatccttgtaagcatcgctacccgagtccaggatggaatttcacaggaaagtgaagggatactgcaggcctgtgtttgcagcgcctgtggtaactgtggaatgagctctgttagggacagttgtctggtttgtgccaaaccttcgaggggcgagtagggagtgggggaggtgggtccaagtctccctcaggaaggccttttctatcggcagcaattccatcaagccaagcctcctgtggtcctgagcatgaaggggccaggggacctcctgggagatgcagcttttgtttccgctgcgtttcatcagtcagccttgcttggaattctggcaggttccccggggtgtttcagtggacaggaggcccccgtgccgtggctgagtcagcctgggtaccccagtcaccagcagggccacccttgatgacagggccccccacgaacctgggaaaggcagcgggaaatgtgtgagagggtgtgcgctggtacggacataaaagcattgtccaaaacagcgctggttcggggagggcccctggatactgcctttggcccacactgaaaactgaaattgccccacctgtgagcacagaaacacgcttctccaacacgggccgaaataactaaactccacatggttcctgcctgctcatttcccagccctcttcttctcaagcctgaacttcatttttttttttagctgcaaatttaacaggctaatttaaaactgcagttttcagacgacagcccctgggaatgttccagggttctcttgttttgatctgcatgtctgtttacacttctctgtaggcgtgggttgaatacaagtttccaaaactttaaaatagaaaaccacgagcttaagaggtgaaaaagatgacccctttctgattaggatctgtaactctgtgggctgggtcaatgcagtgtgcttcattcagggccatgtggcagccatgacacacaccacataaggtcagctcagagcccatggcttccctgcaggagccccatcttgtcgctattagttgggagttgcaatacattgttggccataaacaaagtgctaaaggaaagggtttgcttctacacattcggctgaatgtcccccagtgcagggtggcagcagaatgttctggaaatgaaggagatattgctaggaatctctaggctgttaggcaacctggcttttattcatcctcagccggcaactcatctcaagtttatgtctcagtttttttcctctagaaaggggattacagttcctgtccctgtcttcctccaggacacactgtgaggattaatgacatattggctctaaagtcctttgagctcctgggaacaggtggtgaaagtgtgcgttactgctaaggattagtccctggcctcttctagaatgccgccctcccagctctgcagggcacgctgccagaatccaggctggtcgtaaacatctcagagataatcagggaccaccagaggcagaggccatgagactgtctttggaaaggtttggaaatgcagaaataactacaagggccattctccttagcttctggctttcaactgtttctagatgcttccaagaacaagaacccagcaccaaccagaattaggccacgttttcaccattacttaagctcaatcgcctcttagatgaaatgaggagataaactaaacattaaaatgatgaaggaaaaaaaattatttggaagccgaaaaccgcatgggtggggaaacatcaggaacgaaatcagacacactgactcaaaccacgcaagggtttgagaagcccacccctctaattccaggcgtttgtaatttttctacttcgcacttgagagaaggcagaggtggtccgtgggaaagctccgggaaacagccgtctttcatccttgccacattgaaaaatgtccacaattttatgaattgctgtcctaaccctggcgtttttatccagtgttaaaataaattatttcaagtttcaatgtaaacacttaacagatgacttctttgcagaagaaatgttcgttacctactatcaaactactttttaacagattttgtatatacacacacaagttgacagaggtttacctccctactttcttagattttatgtaactcttttcattggtgcttattcagaacctgaaagccttgggcatccaagctttcacctactcaatggaggagaggtgataatgaatgaaaagattgacaccaggtttcttggacaaatttaagttcaaatttatctctttcaagtagaccatggtctccctagagagtgtgttggcttgtgtctgccagtacgacaaaggacgctcccagcttgatcgtggtaccttatggaagccactcacgcattctctgatttacccccaaaacactaccatgccccagccccactcatttaaataatacaatcatatcactttcaaagggctcagcacgaatgttcccctcactccactttttaactcgtttgctgaactcgacaaggcttccccttacgagcagtgagacctaggctactttcgaacgcttccttccgaacggtaagccacttcgctctcgggcaggacaggtcctccctgcagagagagacaactcatcccccgaccttccatactacagaccaaaatacccaggtgtggcctaaggactatattaaatgcctcctatagaaattcaaggaatgttagaaccaggaaactagctgtttaaagttttaaagaagtatataaatatatatataaatataaatatgaaatcatatcgagtgtgaggatgagcagagtgccaaatattcagcatctgtacaaagtcattcactggaattcaactattttatgtcattctctttctcacgcttttatggttcttttgataaattctatttagtagcatgcaggatacctaatctgaatgtgcaatatgctattcatcaccacgacaatttcttacttcctcttaataacttaccagaatgttggtcattcctttaaggcagttaaggattgctttatttgtgttcttttttcccatgactttttttcactctcagctgactgtaagaaactgtgcaccgtttccgccataaccgtcctgtgacgatgcctccatttgacttctgtatcgctgatgttcacctcctgtaaatagtttggcaattaaattttttgagaaaagtaatgtttacttttttattggagtgaattctcgtgttattttaatctcagaaaaattatatagaccaaagagttttatccgaaaaaaaattacactcttcctccattatatatttcattgttgaaatatcctcaatttctctatattttaagaagtaatggacatttattaaggttacagatttaatatgtatgcaaaatggtatagattaaatgagtttttaattaataaatcctacagtatttagttaa

SEQ ID NO: 344585 - protein, 1006 aa, Artificial Sequence
  derived and/or modified sequence
EEEAGDLVQPGISFPGPAEEDLDPQYSWSPTQHFNEERYSPAPRSMKGLSGSRTQPPLCSGHTCGLAPPEDCEHLHHGPDARPPYLLSPADSCPGGRHRCSPRSSVHSECVMMPVVLGDHVSSSTFPRMHYSSHYDTRDDCAVAHAGAKINRIPANLLDQFEKQLPLHRDGFHTLQYQRTSAAAEQRSESPGRIRHLVHSVQKLFTKSHSLEGSSKSNANGTKADGRADDHHHAHHAKHSKRSKSKERKPEGKPRPGMSSWWSSDDNLDSDSTYRTPSVLNRHHLGPVAHCYPDALQSPFGDLSLKTSKSNNDVKCSACEGLALTPDAKYLKRSSWSTLTVSQAKEAYRKSSLNLDKPLLHQDAKPALRPCHYLQVPQDEWGGYPTGGKDEEIPCRRMRSGSYIKAMGDEESGESDSSPKTSPKSAILPEPLLKSIGQRPLGEHQTQTYLQAASDVPVGHSLDPAANYNSPKFRSRNQSYMRAVSTLSQASCVSQVSEAEINGQFESVCESVFSEVESQAMDALDLPGCFRTRSHSYLRAIQAGYSQDDECIPMMTPSDITSTIRSTAAVSYTNYKKTPPPVPPRTTSKPLISVTAQSSTESTQDAYQDSRAQRMSPWPQDSRGLYNSTDSLDSNKAMNLALETAAAQRHLPESQSSSVRTSDKAILVSKAEELLKSRCSSIGIQVETATDSDTESRGLREYHSVGVQVEDEKRHGRFKRSNSVTAAVQADLELEGFPGHITTEDKGLQFGSSFQRHSEPSTPTQYSAVRTVRTQGLFSYREDYRTQVDTSTLPPPDPWLEPAIDTVETGRMSPCRRDGSWFLKLLHAETKRMEGWCKEMEREAEENDLSEEILGKIRSAVGSAQLLMSQKFQQFYWLCQQNMDPSAMPRPTSQDLAGYWDMLQLSIEDVSMKFDELQRLRLNDWKMMESPERKEERKVPPPIPKKPPKGKFPITREKSLDLPDRQRQEARRRLMAAKRAASFRQNSASERADSIEIYIPEAQTRL

SEQ ID NO: 344586 - protein, 978 aa, Artificial Sequence
  derived and/or modified sequence
  misc_feature (1)..(1): Xaa can be any naturally occurring amino acid
XPTQHFNEERYSPAPRSMKGLSGSRTQPPLCSGHTCGLAPPEDCEHLHHGPDARPPYLLSPADSCPGGRHRCSPRSSVHSECVMMPVVLGDHVSSSTFPRMHYSSHYDTRDDCAVAHAGAKINRIPANLLDQFEKQLPLHRDGFHTLQYQRTSAAAEQRSESPGRIRHLVHSVQKLFTKSHSLEGSSKSNANGTKADGRADDHHHAHHAKHSKRSKSKERKPEGKPRPGMSSWWSSDDNLDSDSTYRTPSVLNRHHLGPVAHCYPDALQSPFGDLSLKTSKSNNDVKCSACEGLALTPDAKYLKRSSWSTLTVSQAKEAYRKSSLNLDKPLLHQDAKPALRPCHYLQVPQDEWGGYPTGGKDEEIPCRRMRSGSYIKAMGDEESGESDSSPKTSPKSAILPEPLLKSIGQRPLGEHQTQTYLQAASDVPVGHSLDPAANYNSPKFRSRNQSYMRAVSTLSQASCVSQVSEAEINGQFESVCESVFSEVESQAMDALDLPGCFRTRSHSYLRAIQAGYSQDDECIPMMTPSDITSTIRSTAAVSYTNYKKTPPPVPPRTTSKPLISVTAQSSTESTQDAYQDSRAQRMSPWPQDSRGLYNSTDSLDSNKAMNLALETAAAQRHLPESQSSSVRTSDKAILVSKAEELLKSRCSSIGIQVETATDSDTESRGLREYHSVGVQVEDEKRHGRFKRSNSVTAAVQADLELEGFPGHITTEDKGLQFGSSFQRHSEPSTPTQYSAVRTVRTQGLFSYREDYRTQVDTSTLPPPDPWLEPAIDTVETGRMSPCRRDGSWFLKLLHAETKRMEGWCKEMEREAEENDLSEEILGKIRSAVGSAQLLMSQKFQQFYWLCQQNMDPSAMPRPTSQDLAGYWDMLQLSIEDVSMKFDELQRLRLNDWKMMESPERKEERKVPPPIPKKPPKGKFPITREKSLDLPDRQRQEARRRLMAAKRAASFRQNSASERADSIEIYIPEAQTRL

SEQ ID NO: 344587 - DNA, 3021 bp, Artificial Sequence
  derived and/or modified sequence
gaagaagaagccggagatttggtacagccaggcatcagcttccccggtccagcagaggaggatctggacccacagtattcttggagccccacacagcactttaacgaagagaggtactcaccagccccacgatccatgaagggcctttcagggtctcgaactcagccaccattatgcagcgggcacacgtgcggtttggctcccccagaagattgcgagcacctgcatcacggacctgatgcccggcctccataccttctgtctccagccgacagctgccccggtggtaggcataggtgctcgccaaggagttccgtacacagcgaatgtgtcatgatgcccgtggtactgggtgaccacgttagttcttccaccttcccgaggatgcactactccagccactatgatactcgggatgattgcgccgtggcccacgcaggcgcaaaaatcaaccgaatccccgccaatctgttggatcagttcgaaaaacaactgccactccaccgagatggtttccacaccctgcaataccagagaacaagtgccgccgcagagcaacgctctgagtcccctggacgcattaggcacctggtgcactccgtccagaagttgtttacgaagtctcacagtttagagggcagctctaagagcaacgctaatggtactaaagctgacggcagagcagacgatcatcaccacgcgcaccacgcaaagcacagtaagagatctaagtccaaggaacgcaaaccagaaggcaagccgcgaccaggtatgtcctcctggtggtctagtgatgataacctcgactcagatagcacataccgaaccccctctgttctgaatcggcatcacttagggccagtggcccattgttaccccgacgcattacagagtccctttggtgacctgtcgttgaagacttctaagagtaataacgatgttaaatgcagcgcttgtgaaggcctggccttgacaccagatgcaaagtatcttaagcggtcctcttggtcaaccctgaccgtgtcacaggccaaggaagcatacaggaagtcctctctgaatttggacaagcccttgctgcatcaggacgctaaacctgccctgagaccttgccactatctgcaagttcctcaagacgagtgggggggctaccccaccggcggtaaagatgaggagataccttgcagaaggatgcggtcagggtcctacattaaggccatgggggacgaagagtcaggagaaagcgattcttccccaaagacctccccaaagtctgccattctgcccgaacctttgctcaagtccataggacaacggcctctgggtgaacaccaaactcagacctacctacaggcggctagcgatgtccccgtggggcactctcttgaccctgccgccaactacaacagccctaagttccgttccaggaatcagagttacatgagggctgtgagcacactatcccaggctagttgcgtgtcgcaagtttccgaggccgaaatcaatggacagttcgagtctgtatgtgagagtgtttttagcgaggtggagagtcaggcgatggatgcactggacttgcccggatgcttccgtaccaggtcacactcctatctgcgagccattcaggccggatattcccaggatgacgagtgcattccaatgatgactccaagcgacatcactagcactatccggagtactgccgccgtctcatacacaaattataagaaaaccccaccccctgtgcccccccggaccacttctaagcccctcatctctgtcacagcacagtcaagcactgagtcaacccaagatgcataccaggactctagggcccagagaatgtcgccctggccacaggacagtcggggcctttacaacagtacagattctctggactctaacaaagcaatgaatctcgcactggaaacagccgctgcccaaaggcatctacccgagtcccagtcaagtagtgtcagaacctccgacaaggccatcttggtgtccaaggccgaagagctgctgaagagcaggtgttcctccatagggatccaggtggaaaccgcaaccgattctgacaccgagtctagagggctacgagaataccatagcgtgggcgtgcaagtggaagacgaaaagagacacgggaggttcaagcgatccaactccgtcactgctgccgtgcaggcagatctcgaactggaaggtttccccggtcacattacaactgaagataagggactgcaattcggcagttcatttcagcggcattccgagcccagtacacctactcagtactcggcagtgcgtactgttcgtacccagggtttgttctcgtaccgggaagactaccgaacccaggtagacacaagcacgctgccccctccagatccatggttagaacccgcaattgatacggttgagactgggcgcatgtctccttgccgaagagatgggtcctggttcttaaaactgttacatgcggagacaaaacggatggaaggctggtgcaaggagatggaacgagaggctgaggagaacgatctctcagaggagattcttggcaagattcgctccgctgtgggcagcgcgcaattacttatgagtcaaaaatttcaacaattttactggctatgccaacagaacatggatccctccgccatgcctaggccaacatcacaagatcttgcaggatactgggacatgctgcagctgtctatcgaagacgtttctatgaaattcgatgagctgcaacggctgagattaaacgattggaaaatgatggagagccccgagcggaaagaggaaaggaaggtcccgcctcccatcccgaagaagccaccaaaagggaaatttcctatcactcgggagaagagcctggacctgcccgatcgtcagagacaggaagctaggcgccgcctcatggcagcaaagcgcgccgctagtttcagacagaactctgcctctgagcgggcagactctattgagatttacattcccgaagctcagacccgattatag

SEQ ID NO: 344588 - DNA, 2937 bp, Artificial Sequence
  derived and/or modified sequence
tagccgacacaacacttcaacgaggagaggtatagccccgctccccgctcgatgaaggggttgtctggctcccgcacgcagcccccactttgtagcggccacacatgtggcctcgccccccccgaggattgcgaacatttacatcatggtccagatgctcgcccgccctatctcctgtctcctgcggacagctgccccggaggcaggcatagatgttccccaagatcttccgtgcactctgagtgcgttatgatgccagtggttctcggagatcacgtgagcagttcaaccttccctaggatgcactatagtagtcactatgacactagagacgattgtgcagttgcacatgctggggcgaagattaacaggattccagccaacctgttggaccagttcgagaagcagcttcccttacatcgcgacggtttccacactcttcagtatcaacgcactagcgctgcagccgaacagaggtccgagtcgcccggaaggattcgccatctggtccattctgtccagaaactattcacaaaaagccacagtcttgaagggagctcaaaatccaatgcgaacgggaccaaggcagacgggcgagcggacgatcaccaccacgcccaccatgccaagcattccaagagatctaagagcaaggagagaaagcccgaggggaagcccagaccaggcatgagctcttggtggtcttccgacgataacctggattccgattctacctaccggaccccctctgtgcttaatcggcaccacttggggcctgtggctcattgctacccggacgccctgcagtctccctttggggatctttccttaaaaacctctaagtcaaataacgacgtgaaatgtagcgcctgcgagggtctggctttgacaccagatgcaaaatatctgaaacgatctagctggtccaccctaactgttagccaggctaaggaggcctacagaaagtcctctctgaacctggacaaacctctgctgcaccaggacgcgaaaccagccctcagaccctgccattaccttcaggtcccacaggatgaatggggggggtaccccacgggcggcaaggacgaggagattccatgccggcgcatgcggtccggttcctatataaaggcgatgggggatgaggagtcgggagaaagcgatagctcacctaaaacatcccccaagtccgccatactgccagagcctttgctcaaaagcattggtcagcgaccactgggagaacaccagacccagacataccttcaagccgccagcgacgtcccagtaggccatagccttgatcccgcagcaaattacaattcacccaaattccgcagccgtaaccaaagctacatgagagcagttagcacactgtcccaggcatcatgtgtgagccaggtgtcagaggccgaaatcaatgggcagttcgagtccgtctgcgagtcagttttttccgaggtcgagtcccaggccatggatgcgctggacctgccggggtgttttcggacccgctcccacagctacttacgcgctattcaggcaggctattctcaggacgacgaatgtattcctatgatgactccctcagatattacctctacaatacggagtactgctgcagtttcctacactaattataaaaagaccccaccccccgtgccgccccggaccacatctaaacccttaatctctgtcacggctcagtcttccaccgagagtacgcaggacgcataccaagattcacgggcccagcgaatgagcccatggccccaggatagtcgggggctgtacaattccactgattcgttggactccaacaaggccatgaacctcgctctcgaaaccgccgccgcccaacggcacttgccagagtctcaatcttcatctgtgcgcaccagtgacaaagcaatcctcgtctccaaagccgaggaactgctgaaaagtagatgctctagcatcggtatacaggttgaaacagctactgacagtgacacggagtccaggggcctgcgcgaataccactctgttggcgttcaggtggaagacgaaaagaggcatgggcggttcaaacgctctaattcagtcacagccgctgtgcaggccgatcttgagctggaaggatttcccggccatatcacaaccgaggacaagggcctgcaattcggcagcagcttccaacgtcattctgagccctctactcccacgcagtattcagctgtgcgcactgttagaacccagggactgttctcctaccgtgaagactacagaacgcaggttgataccagtacactgcccccaccagatccttggttggagccagctatcgacactgtggaaaccggacggatgtccccttgccggagggatgggagctggtttctgaaattactacatgctgaaactaaaaggatggaaggctggtgcaaggagatggagagagaagcagaggagaacgacctgagcgaagaaattctcggcaagatccgctccgccgtgggcagtgcccaactcttgatgagtcaaaagttccaacagttctactggctctgtcagcagaatatggatccatctgctatgcctagaccgaccagccaagatttggcaggttattgggatatgctgcagttaagtattgaggatgtgtccatgaaattcgacgaattgcaacgcctgagactaaacgactggaagatgatggagagccctgagagaaaagaggaacggaaagtgcctcctccaatcccaaaaaagccccccaaaggaaaatttccaattacccgtgagaagtcactggaccttcccgacaggcagcgtcaggaggcaaggcgtagattgatggccgcaaagagagcagcttcatttcggcaaaattcagcttctgagcgtgctgatagcatcgagatttacattcctgaagctcagaccagactgtag

SEQ ID NO: 344589 - DNA, 3021 bp, Artificial Sequence
  derived and/or modified sequence
gaggaggaggccggggacctggtgcagcccggcatctccttccctggccctgctgaggaggacctggacccccagtacagctggagccccacccagcacttcaatgaggagcgctacagccctgcccccaggtccatgaagggcctgagcggcagcaggacccagccccccctgtgcagcggccacacctgtggcctggcccctcctgaggactgtgagcacctgcaccacggcccagatgcccggcccccctacctgctgagccctgctgacagctgccctgggggccgccaccgctgcagccccaggagctctgtgcacagtgaatgtgtgatgatgcctgtggtgctgggggaccacgtgagcagcagcaccttccccaggatgcactacagcagccactatgacaccagagatgactgtgctgtggcccacgccggggccaagatcaaccgcatcccagccaacctgctggaccagtttgagaagcagctgcccctgcacagagatggcttccacaccctgcagtaccagaggaccagcgctgctgctgagcagaggtctgagagccctggccgcatccgccacctggtgcacagcgtgcagaagctgttcaccaagagccacagcctggagggcagcagcaagagcaatgccaacggcaccaaggcagatggccgggcagatgaccaccaccacgcccaccacgccaagcacagcaagaggagcaagagcaaggagaggaagccagagggcaagccccggcccggcatgagctcctggtggagcagtgatgacaacctggacagcgacagcacctaccgcacccccagcgtgctgaacagacaccacctgggccctgtggcccactgctacccagatgccctgcagagcccctttggagacctgagcctgaagaccagcaagagcaacaatgatgtgaagtgcagcgcctgtgagggcctggccctgaccccagatgccaagtacctgaagaggagctcctggagcaccctgactgtgtcccaggccaaggaggcctacaggaagagcagcctgaacctggacaagcccctgctgcaccaggatgccaagccagccctgcggccctgccactacctgcaggtgccccaggatgagtggggcggctaccccaccggcggcaaggatgaggagatcccctgcaggaggatgaggagcggcagctacatcaaggccatgggagatgaggagagcggggagagtgacagcagccccaagaccagccccaagagcgccatcctgcctgagcccctgctgaagagcatcggccagaggcccctgggggagcaccagacccagacctacctgcaggccgccagtgatgtgcctgtgggccacagcctggaccctgctgccaactacaacagccccaagttccgcagcaggaaccagagctacatgagagctgtgtccaccctgagccaggccagctgtgtgtcccaggtgtctgaggccgagatcaatggccagtttgaatctgtgtgtgagagcgtcttcagcgaggtggagagccaggccatggatgccctggacctgcccggctgcttccgcaccaggagccacagctacctgcgggccatccaggccggctacagccaggatgatgagtgcatccccatgatgacccccagcgacatcaccagcaccatccgcagcacagctgctgtgtcctacaccaactacaagaagaccccacctcctgtgccccccaggaccaccagcaagcccctcatctctgtgacagcccagagcagcacagagagcacccaggatgcctaccaggacagccgggcccagaggatgagcccctggccccaggacagccggggcctgtacaacagcacagacagcctggacagcaacaaggccatgaacctggccctggagacagctgctgcccagaggcacctgcctgagagccagagcagctctgtgaggaccagtgacaaggccatcctggtgtccaaggccgaggagctgctgaagagccgctgcagcagcatcggcatccaggtggagacagccacagacagcgacacagagagccggggcctgcgggagtaccacagcgtgggcgtgcaggtggaggatgagaagagacatggccgcttcaagaggagcaacagcgtgacagctgctgtgcaggccgacctggagctggagggcttccctggccacatcaccacagaggacaagggcctgcagtttggcagcagcttccagaggcacagcgagcccagcacccccacccagtacagcgctgtgaggacagtgaggacccagggcctcttctcctaccgggaggactaccgcacccaggtggacaccagcaccctgcccccaccagacccctggctggagcccgccatcgacacagtggagactggaaggatgagcccctgcagaagagatggctcctggttcctgaagctgctgcacgccgagaccaagaggatggagggctggtgcaaggagatggagcgggaggccgaggagaatgacctgtctgaggagatcctgggcaagatccgctctgctgtgggcagcgcccagctgctgatgagccagaagttccagcagttctactggctgtgccagcagaacatggaccccagcgccatgccccggcccaccagccaggacctggccggctactgggacatgctgcagctgagcattgaagatgtgtccatgaagtttgatgagctgcagaggctgcggctgaatgactggaagatgatggagagccctgagaggaaggaggagaggaaggtgcccccacccatccccaagaagccacccaagggcaagttccccatcacccgggagaagagcctggacctgcctgaccggcagaggcaggaggcccggcggcggctgatggccgccaagagagctgccagcttccggcagaacagcgccagcgagagagctgacagcattgagatctacatccctgaggcccagacccggctgtag

SEQ ID NO: 344590 - DNA, 2937 bp, Artificial Sequence
  derived and/or modified sequence
tgacccacccagcacttcaatgaggagcgctacagccctgcccccaggtccatgaagggcctgagcggcagcaggacccagccccccctgtgcagcggccacacctgtggcctggcccctcctgaggactgtgagcacctgcaccacggcccagatgcccggcccccctacctgctgagccctgctgacagctgccctgggggccgccaccgctgcagccccaggagctctgtgcacagtgaatgtgtgatgatgcctgtggtgctgggggaccacgtgagcagcagcaccttccccaggatgcactacagcagccactatgacaccagagatgactgtgctgtggcccacgccggggccaagatcaaccgcatcccagccaacctgctggaccagtttgagaagcagctgcccctgcacagagatggcttccacaccctgcagtaccagaggaccagcgctgctgctgagcagaggtctgagagccctggccgcatccgccacctggtgcacagcgtgcagaagctgttcaccaagagccacagcctggagggcagcagcaagagcaatgccaacggcaccaaggcagatggccgggcagatgaccaccaccacgcccaccacgccaagcacagcaagaggagcaagagcaaggagaggaagccagagggcaagccccggcccggcatgagctcctggtggagcagtgatgacaacctggacagcgacagcacctaccgcacccccagcgtgctgaacagacaccacctgggccctgtggcccactgctacccagatgccctgcagagcccctttggagacctgagcctgaagaccagcaagagcaacaatgatgtgaagtgcagcgcctgtgagggcctggccctgaccccagatgccaagtacctgaagaggagctcctggagcaccctgactgtgtcccaggccaaggaggcctacaggaagagcagcctgaacctggacaagcccctgctgcaccaggatgccaagccagccctgcggccctgccactacctgcaggtgccccaggatgagtggggcggctaccccaccggcggcaaggatgaggagatcccctgcaggaggatgaggagcggcagctacatcaaggccatgggagatgaggagagcggggagagtgacagcagccccaagaccagccccaagagcgccatcctgcctgagcccctgctgaagagcatcggccagaggcccctgggggagcaccagacccagacctacctgcaggccgccagtgatgtgcctgtgggccacagcctggaccctgctgccaactacaacagccccaagttccgcagcaggaaccagagctacatgagagctgtgtccaccctgagccaggccagctgtgtgtcccaggtgtctgaggccgagatcaatggccagtttgaatctgtgtgtgagagcgtcttcagcgaggtggagagccaggccatggatgccctggacctgcccggctgcttccgcaccaggagccacagctacctgcgggccatccaggccggctacagccaggatgatgagtgcatccccatgatgacccccagcgacatcaccagcaccatccgcagcacagctgctgtgtcctacaccaactacaagaagaccccacctcctgtgccccccaggaccaccagcaagcccctcatctctgtgacagcccagagcagcacagagagcacccaggatgcctaccaggacagccgggcccagaggatgagcccctggccccaggacagccggggcctgtacaacagcacagacagcctggacagcaacaaggccatgaacctggccctggagacagctgctgcccagaggcacctgcctgagagccagagcagctctgtgaggaccagtgacaaggccatcctggtgtccaaggccgaggagctgctgaagagccgctgcagcagcatcggcatccaggtggagacagccacagacagcgacacagagagccggggcctgcgggagtaccacagcgtgggcgtgcaggtggaggatgagaagagacatggccgcttcaagaggagcaacagcgtgacagctgctgtgcaggccgacctggagctggagggcttccctggccacatcaccacagaggacaagggcctgcagtttggcagcagcttccagaggcacagcgagcccagcacccccacccagtacagcgctgtgaggacagtgaggacccagggcctcttctcctaccgggaggactaccgcacccaggtggacaccagcaccctgcccccaccagacccctggctggagcccgccatcgacacagtggagactggaaggatgagcccctgcagaagagatggctcctggttcctgaagctgctgcacgccgagaccaagaggatggagggctggtgcaaggagatggagcgggaggccgaggagaatgacctgtctgaggagatcctgggcaagatccgctctgctgtgggcagcgcccagctgctgatgagccagaagttccagcagttctactggctgtgccagcagaacatggaccccagcgccatgccccggcccaccagccaggacctggccggctactgggacatgctgcagctgagcattgaagatgtgtccatgaagtttgatgagctgcagaggctgcggctgaatgactggaagatgatggagagccctgagaggaaggaggagaggaaggtgcccccacccatccccaagaagccacccaagggcaagttccccatcacccgggagaagagcctggacctgcctgaccggcagaggcaggaggcccggcggcggctgatggccgccaagagagctgccagcttccggcagaacagcgccagcgagagagctgacagcattgagatctacatccctgaggcccagacccggctgtag

SEQ ID NO: 344591 - DNA, 3021 bp, Artificial Sequence
  derived and/or modified sequence
gaggaggaggccggcgacctggtgcagcccggcatcagcttccccggccctgcagaggaggacctagacccccagtatagttggagccctactcagcacttcaatgaggagagatatagcccagcacctaggtccatgaaaggcttgagtggaagtagaacgcaaccgcctttatgcagcggccacacatgtggcttggccccacctgaggactgcgaacacctacatcatggcccagacgcccgccctccctatctcctcagtccagctgattcatgccctggcggcaggcatcggtgcagcccgaggtccagtgtgcactccgagtgcgttatgatgccagtggtactgggcgaccacgtgagctcttccaccttcccacgcatgcactatagctcgcattatgataccagagacgattgtgccgtggcccatgcaggggcaaaaatcaacagaatccctgcaaacctgctggatcaatttgaaaagcaattacctctgcaccgcgatgggtttcacactttacagtatcagagaacaagcgccgcagccgagcagcgttcagagtcacctgggagaatccggcatctcgtgcactctgtgcagaaattgttcactaaatcccacagcctggaagggagttccaagagcaatgctaacgggaccaaagccgacggccgggctgacgaccaccaccacgcccaccatgccaagcatagcaaacgctccaagagtaaagaaaggaagcccgagggtaagccccgacccggcatgtctagctggtggtcgagcgacgacaatctggactctgactccacctatcgaacaccttcagtgcttaacagacaccatttaggtccagttgcgcactgctaccccgatgctctccaaagccccttcggagacctctctctgaagacaagtaaatctaataacgacgtgaaatgttccgcatgcgagggtttggccctgaccccagacgccaagtacttaaagagatcttcctggtccacccttaccgtttcccaggcaaaggaggcttaccgcaagtcatccctcaacttggacaagccccttctacatcaggatgctaagccagcccttcgtccctgtcattacctccaagtgccacaggacgagtgggggggctatcccaccggaggaaaagatgaagaaattccatgtagaagaatgcggtcgggctcatacattaaggccatgggagacgaggagagcggcgaaagtgacagcagtccaaaaacatcaccaaaaagcgctatcttgccagaacctctgctgaaaagcatcggacagcggcctctgggagagcaccagacccagacctatctgcaggccgcttccgacgtgcctgttggccatagtcttgacccggccgccaactacaatagccccaagttccggtccaggaatcagtcttatatgagagctgtttcaaccctctcacaagctagctgcgttagtcaggtctcagaggcagagatcaacgggcagttcgaatcggtgtgtgaatcagtgttcagtgaggtggagtcacaggctatggatgcgttggatctgcccggttgcttccgcacacgatctcactcttacctcagagctatacaggccggctatagccaagacgatgagtgtatccctatgatgacgcctagcgatatcactagcaccatccggagtacagctgccgtctcttacaccaactacaagaagactcctcctcctgtgcctcctcgtaccacctccaagccgctgatctcggtcacagcacaaagtagcacagagtcaactcaagacgcctatcaggattctcgcgctcagagaatgtcgccttggcctcaagatagccgcggtctgtacaattcaacagactccctcgatagcaacaaggcgatgaatcttgctctggaaaccgccgccgcgcaacgccacctgccagagagccagtccagctctgtccggaccagcgataaggctatcctggtctcaaaggcagaggaattgcttaaaagccgttgttccagcatcggtattcaagtcgaaactgccaccgactcagacacagagagcagaggactcagggagtatcattccgtgggcgtgcaggtggaggacgaaaaacgtcatggtaggtttaaaaggagtaatagcgtgaccgccgcagtacaggccgacctggagcttgagggatttcccggccatatcacaacagaagataagggcttacagtttggttcctcatttcagcggcattcggagccttccactccaactcaatacagcgcggtaaggactgtacgtacacagggtctgttctcttaccgagaagattatagaactcaagttgacacctctaccctgcctccccctgatccctggttggagcccgccatcgataccgtggaaactggtcgcatgtcaccttgcaggcgggacggaagctggtttttgaagcttctccatgcagaaacaaagcggatggagggatggtgtaaagaaatggaaagagaggcagaggagaatgatttatcagaggaaatcctggggaaaatcaggagcgccgtaggttccgcccaactcctgatgtcacagaaatttcaacaattttattggctgtgtcaacagaacatggaccccagtgccatgcctcgccccacatctcaggatctggcaggttattgggacatgctgcagctttctattgaagacgtgagcatgaagtttgatgagctccagagactgcgtctgaacgactggaaaatgatggaatccccagaacgcaaggaagaacgaaaggtccctcccccaatccctaagaagcctccaaagggtaaattcccgatcacacgcgagaaatccctcgacctacctgataggcagcggcaggaggcccgcagaagactcatggccgccaagagggctgctagttttaggcaaaatagcgcctccgagcgcgctgactcaatcgaaatatacattcctgaagcgcagaccagactctag

SEQ ID NO: 344592 - DNA, 2937 bp, Artificial Sequence
  derived and/or modified sequence
tgacccacccagcacttcaacgaggagcggtacagccccgccccccggagcatgaaaggactctccgggtcccgtactcaacctcctctgtgctccggccacacatgcggcttggcacctccggaggactgcgagcatttacatcatggaccagacgcaaggccaccgtatctgctgagccctgctgactcatgccctgggggacggcaccgatgcagccctaggagtagcgtgcattcagagtgcgtgatgatgccagtggtgttaggagaccatgtgagctcctcgaccttcccacgtatgcactactcatctcactacgacacccgtgacgattgcgccgttgcccatgcgggcgcaaaaataaacagaataccagccaacctgttagatcagtttgagaaacagctgccgcttcatcgggatggtttccatacactacaatatcagcggactagtgccgccgctgagcagcgtagcgagagccccggacgcatccgccacttggtccatagcgttcagaagctcttcacaaaaagtcattctttggaaggaagctcaaagtctaatgcaaacgggaccaaggccgacggcagggctgatgaccatcatcacgcccatcacgcgaagcattcaaaaagaagcaagagcaaagagcgaaagcccgaaggaaagccaagacctggtatgagttcttggtggtcgagcgatgacaacctggactcagacagtacatatagaactcctagcgtcttgaatcgccaccacctggggcccgtggctcactgttacccagatgctctccagtctccgtttggagacctttcgctgaaaacaagcaaaagtaacaatgatgtaaagtgttctgcctgtgaaggcctcgcattgacaccagatgccaaatacttgaaaaggagctcatggtctacactgactgtcagccaggctaaagaggcctaccggaagagctcacttaatcttgacaagccacttctgcaccaggacgccaagcctgccctgcgaccctgtcattatctgcaggtgccccaggatgaatggggcggctatccaactggggggaaagatgaagaaatcccttgccggagaatgagaagcgggagttacatcaaagctatgggagacgaagagagcggtgagagcgattcgtctcctaaaaccagtcccaagtccgctattttgcccgaacctctcttgaaaagtatcgggcagagaccactgggggaacatcagactcagacatacctacaagctgccagtgatgtccctgtgggccatagccttgatccagcagcaaattacaactcacccaagttccgcagtcgcaaccagagctacatgcgtgccgttagtaccctgagtcaggcctcctgtgtctctcaggtttccgaggccgagatcaatggacagttcgagtccgtctgcgaaagcgtgttctctgaggttgagtcacaggctatggacgcactggacctgccaggatgtttcaggactcggagccacagttacctgcgagcaatccaggcggggtactcccaggacgacgaatgtatccccatgatgactccaagcgacatcacaagtactatccgttctaccgctgccgtgtcgtacactaactataagaagacccccccgcccgtacctccccgtaccaccagcaaaccacttatttccgtgaccgcacagtcttccacagaatctacccaggacgcatatcaggactctcgcgcacaacgtatgtctccttggccacaggatagccgcggtctgtataactctacagattctttggattcaaacaaagctatgaatcttgccttggagacggccgcggctcaacggcacctgccggaaagtcagtccagtagcgtgaggacctcagataaggccatcttggtgtcaaaggcagaagaactgctgaagagccgctgttcctccataggtattcaggtggaaactgcaactgactcggacaccgagtcacgaggactgcgcgagtaccattccgtgggggtgcaggtcgaagacgaaaagagacatggtcgtttcaaacgaagtaattcagtgaccgccgccgtgcaggctgacctggagctcgagggatttccagggcatattacaactgaggataagggtctccaatttggtagttcattccagaggcattccgagccttctacacctacccagtattccgctgtgaggacagtcaggactcagggccttttcagttacagggaagactacagaacgcaggttgacacttcaacccttccccctccagacccgtggctggagcccgccattgatacagtggagaccgggcggatgagcccttgcaggagagatggaagttggttcctgaagctgctgcacgcggagaccaaaaggatggagggctggtgcaaggagatggaacgagaagccgaggagaacgacctgtccgaggagattctcgggaaaattagaagcgccgtcgggtccgcccagctcctgatgtcacaaaagtttcaacagttctactggctgtgtcagcagaatatggatccatccgccatgccaaggcccacctcgcaggatctcgcagggtactgggacatgctgcagttatcaatcgaggacgtgagcatgaagttcgacgagctgcagagattgaggctgaatgactggaagatgatggagtcacccgaaagaaaagaagagagaaaagtaccacctccgatcccaaagaagccacccaagggtaagttcccaattactagagagaagagtttggaccttcctgaccggcagagacaagaagctagaagacgtctgatggcggccaagagggcagccagtttcaggcaaaactcagcctctgagagagccgatagcattgagatctatattcccgaagcacagacacggctgtag

SEQ ID NO: 344593 - DNA, 3021 bp, Artificial Sequence
  derived and/or modified sequence
gaggaggaggccggagacctggtgcagcctggcatctcgttccccggacccgctgaggaggacctggacccccagtactcttggagtccgacccaacattttaatgaggaaaggtacagccccgctccccgaagcatgaagggcctctctgggtctagaacccagcctccactgtgtagcgggcacacctgcgggctcgcaccacccgaggactgcgaacatctccaccacggtccggatgcccgaccaccttatctgctcagtcctgccgatagttgtccgggaggcaggcataggtgcagcccgaggtccagtgtgcatagtgaatgtgtgatgatgcccgttgtgcttggggaccacgtatctagctcaacattccccagaatgcattactcttcacattacgacacccgagatgattgtgctgtggctcatgccggagccaagatcaaccggataccagccaaccttctggaccagtttgagaaacagctgccgttgcaccgtgacggcttccacacgctccagtaccaacgcacttctgcggcagcagaacagcgctctgaaagccccggtaggatccgtcaccttgtgcattctgtgcaaaagctgtttacaaagtcccactcgttagagggttcctctaagagcaatgcaaacggaacaaaagcagacggtagggcagatgaccaccatcacgcacaccatgcaaagcactcaaaacgtagcaaatcaaaagaacggaaaccagagggaaagccgcgtcccggaatgagctcctggtggagttctgacgacaatcttgattctgactcgacttaccggactcccagtgttctgaatcgccatcacctgggaccggtggcccactgctaccccgatgctctccagtctccattcggggatctgtctttaaaaacatcgaagtctaacaatgatgttaagtgctccgcctgcgaggggttagccctgacccccgatgccaaatacttaaagcgaagttcctggtccacacttacagtgtctcaagccaaggaagcctataggaagagcagtcttaacctagacaagcccctgctgcatcaggatgccaaacctgccctccgcccttgtcattacctccaggttccccaagatgagtggggtggttaccccacaggaggtaaagatgaggagattccgtgtcggaggatgaggtccgggtcttatattaaggctatgggcgacgaggaaagcggagagagtgattccagtcccaaaacttcccccaagtctgccattctacccgaacccctcttgaagtccattgggcagcggcctttgggcgaacatcaaacacaaacgtacctacaagcggcatctgatgtgccagtgggccacagtctggatcccgctgctaactataatagcccaaaatttaggagtcggaatcaatcttatatgcgcgcagtttcaacattgtcacaggcatcctgtgtaagccaggtcagcgaggccgaaatcaacggtcagttcgagtctgtctgtgaatccgtgttctccgaggtggaaagtcaggccatggacgccctggacttaccaggatgtttccggacaagaagtcactcctacctccgggctattcaagccggttacagccaggatgatgagtgcatccctatgatgacccccagtgacattacctctaccataagatcaacagccgctgtgagttacaccaattacaagaagacccccccaccagtcccaccaagaaccaccagcaagccgctcatatcagtgacagcacagtccagcactgagagcacacaggacgcctatcaggattccagagctcagagaatgtccccctggccgcaagatagccgcggtctgtacaattccacagacagtctcgattcaaataaagcgatgaacctggccttggagacagccgcagcccagcggcacctgccggagagccagtcctctagcgtgaggacatccgataaggcaattctcgtctcaaaggccgaagaactgttgaaatcacgctgcagctctataggaatccaggtcgagactgccaccgactccgataccgaatctagggggctgagagagtatcacagtgtaggtgttcaggtggaggacgagaagaggcacggtcggtttaagagaagcaacagcgtaacagccgcagtgcaggctgacctggaacttgagggctttccgggacacatcactactgaagacaaagggctccagtttggaagctcctttcaacgccacagcgagccttctactcccactcagtacagcgctgtgcgaacggttcggacgcaaggcctgttctcctaccgggaggattataggactcaggtggacacttcaaccctgccgccacctgacccatggttagagcccgctattgataccgtggagactgggagaatgtctccatgtagacgtgacgggtcctggttcctgaaactactgcatgccgaaacaaagagaatggaggggtggtgtaaagagatggaacgagaagcggaggagaacgacctctccgaggaaatcctaggtaagatcagatctgccgtgggatcggcccagctcctgatgagtcagaagtttcaacagttttactggttatgtcaacaaaatatggatccctctgctatgccccgtccgacatcccaggaccttgctgggtattgggacatgctgcagctgtcaatagaagacgttagcatgaaattcgacgagctccagcggctacggttgaacgattggaaaatgatggagagtcccgaaagaaaagaggagcggaaggttccccctccgattccaaagaaacctccaaaggggaaatttccaatcacgcgcgagaaatcccttgatctgcctgacaggcagcggcaggaggcccgtcgcagactcatggctgcaaagagagcggcttcattccgtcagaactccgcctcagaaagggcagacagcattgagatatatatccccgaagcccagacacggctgtag

SEQ ID NO: 344594 - DNA, 2937 bp, Artificial Sequence
  derived and/or modified sequence
tgacccactcaacacttcaacgaagagagatatagtcccgctcctcggagcatgaagggcctgtcaggaagtaggactcagcctccactgtgttcgggccacacttgcggcttggcaccccctgaagactgcgaacacctacatcatgggccagacgccagaccgccatatctgctgtcccccgctgacagctgccccggaggaaggcaccgctgctcccctcggtctagcgttcacagcgagtgcgtgatgatgcctgtggtactcggcgatcatgtaagttcatccaccttcccacggatgcactacagctctcattacgacactagagatgattgtgctgtggcccatgcaggagcaaagataaatcggatccccgcaaacctgcttgaccaatttgagaagcagctaccccttcaccgcgatggctttcacacacttcagtaccagcgtactagcgcggctgccgaacagagatcagagtcacccggtcgaatccgccacctagtccactccgtgcaaaagttgtttacaaaaagccacagtcttgagggatcctccaaatctaacgctaacggcactaaagctgacggccgagcagacgatcatcaccatgctcaccacgccaagcatagcaagcggtcaaaaagtaaagagcgtaagccagagggaaaaccacgccctggtatgagtagctggtggtcatccgacgataacctcgattccgactccacttacagaaccccatccgtcctgaatagacaccacctgggaccagttgcacactgttatccggacgcactacagtcacccttcggagacctctccctgaagacaagcaagtctaacaatgatgtgaagtgctctgcctgtgagggcttagccctcactccagacgcaaagtacctaaaacgaagctcatggagcacccttacagtctctcaggccaaagaggcttaccggaagagtagcctgaacctcgacaagcctcttctgcaccaggacgctaagcccgctctgaggccttgccactatctgcaggtcccacaggatgaatgggggggttatccaactggcggtaaagatgaagagatcccatgtagacgcatgaggtccggatcatatattaaggccatgggagatgaggaatcgggagagagcgattctagccccaaaaccagtcccaaatccgctattctgcccgagcctctgctgaagtcgataggacaaagacccctcggagaacaccagacccagacatacctgcaggcagcgagtgatgtcccagtggggcactcccttgaccctgccgcaaactataactcgcccaagttcagaagccgcaaccagagctacatgcgcgctgtcagtacgttgagccaggcctcgtgcgtctcccaggtgtctgaggctgagatcaacggacagtttgagagcgtctgtgaaagtgtgttttccgaggtggagagtcaggccatggacgccttggatctgcccggttgctttagaaccaggagccactcttacctgcgggctatccaagctggttatagccaagacgatgagtgtatccctatgatgaccccaagcgacattaccagtacgattaggtcgacggctgccgtgtcctacaccaattataagaaaaccccgccacccgtcccaccgagaactacatcaaagcccctaatctctgtcacagcccagagctccaccgaatccacccaggatgcataccaggattcccgtgcccagcggatgtctccgtggccgcaggacagtagaggtctctataactccaccgattccctcgactctaataaagcaatgaacctggccttagaaacagccgctgcccagagacatctcccagaatcacagtctagttctgtccgcacatccgacaaggctattctggtgtcaaaggcagaggagctcctgaagagcagatgttcctccatcgggatccaggtggaaaccgctacagacagcgatacagaaagccggggtttgcgggagtaccattctgtcggagtgcaggtcgaggatgagaaacgccacggcaggttcaagcggtccaattccgttacggctgccgttcaggccgacctcgagctggaaggctttcctggccacatcacaacagaagataagggactacagttcggctcatccttccagaggcactccgagcccagcacacctacccagtacagcgccgtccgcactgtgcgaactcagggcttgttttcctaccgggaagattacagaacacaggtggataccagcacacttccaccccctgacccgtggctggagccagccatagatacggtcgagaccggccgtatgagcccctgcagaagggatggttcttggtttctgaagctactccatgcggagaccaagagaatggagggttggtgcaaggaaatggaacgagaggctgaagagaatgacctgtctgaagaaattttggggaaaatccgaagcgcagttggaagcgctcagttgctaatgtcacagaaatttcaacaattttactggctgtgccagcagaacatggacccgtccgccatgcccaggccgacatcgcaggatctggccggatactgggatatgctgcagctgagcattgaggatgtgagtatgaaatttgacgagctgcagagactgcgactgaatgactggaagatgatggaatctcccgagcgcaaagaggagaggaaggtgccccctcccatccccaaaaagcctccaaagggaaaattccccatcactcgggagaagtccctggatctccccgatagacagcgacaggaggctaggcgcagactcatggcagcaaaacgcgcagcctcttttcgccaaaacagcgcttcagaaagggcggatagcatcgagatctatatcccggaggctcagacaaggctttag

SEQ ID NO: 344595 - DNA, 3021 bp, Artificial Sequence
  derived and/or modified sequence
gaggaggaggccggcgacctggtgcagcccggcatcagcttccccggccccgccgaggaggacctggacccccagtacagctggagccccacccagcacttcaacgaggagagatacagccccgcccccagaagcatgaagggcctgagcggcagcagaacccagccccccctgtgcagcggccacacctgcggcctggccccccccgaggactgcgagcacctgcaccacggccccgacgccagacccccctacctgctgagccccgccgacagctgccccggcggcagacacagatgcagccccagaagcagcgtgcacagcgagtgcgtgatgatgcccgtggtgctgggcgaccacgtgagcagcagcaccttccccagaatgcactacagcagccactacgacaccagagacgactgcgccgtggcccacgccggcgccaagatcaacagaatccccgccaacctgctggaccagttcgagaagcagctgcccctgcacagagacggcttccacaccctgcagtaccagagaaccagcgccgccgccgagcagagaagcgagagccccggcagaatcagacacctggtgcacagcgtgcagaagctgttcaccaagagccacagcctggagggcagcagcaagagcaacgccaacggcaccaaggccgacggcagagccgacgaccaccaccacgcccaccacgccaagcacagcaagagaagcaagagcaaggagagaaagcccgagggcaagcccagacccggcatgagcagctggtggagcagcgacgacaacctggacagcgacagcacctacagaacccccagcgtgctgaacagacaccacctgggccccgtggcccactgctaccccgacgccctgcagagccccttcggcgacctgagcctgaagaccagcaagagcaacaacgacgtgaagtgcagcgcctgcgagggcctggccctgacccccgacgccaagtacctgaagagaagcagctggagcaccctgaccgtgagccaggccaaggaggcctacagaaagagcagcctgaacctggacaagcccctgctgcaccaggacgccaagcccgccctgagaccctgccactacctgcaggtgccccaggacgagtggggcggctaccccaccggcggcaaggacgaggagatcccctgcagaagaatgagaagcggcagctacatcaaggccatgggcgacgaggagagcggcgagagcgacagcagccccaagaccagccccaagagcgccatcctgcccgagcccctgctgaagagcatcggccagagacccctgggcgagcaccagacccagacctacctgcaggccgccagcgacgtgcccgtgggccacagcctggaccccgccgccaactacaacagccccaagttcagaagcagaaaccagagctacatgagagccgtgagcaccctgagccaggccagctgcgtgagccaggtgagcgaggccgagatcaacggccagttcgagagcgtgtgcgagagcgtgttcagcgaggtggagagccaggccatggacgccctggacctgcccggctgcttcagaaccagaagccacagctacctgagagccatccaggccggctacagccaggacgacgagtgcatccccatgatgacccccagcgacatcaccagcaccatcagaagcaccgccgccgtgagctacaccaactacaagaagacccccccccccgtgccccccagaaccaccagcaagcccctgatcagcgtgaccgcccagagcagcaccgagagcacccaggacgcctaccaggacagcagagcccagagaatgagcccctggccccaggacagcagaggcctgtacaacagcaccgacagcctggacagcaacaaggccatgaacctggccctggagaccgccgccgcccagagacacctgcccgagagccagagcagcagcgtgagaaccagcgacaaggccatcctggtgagcaaggccgaggagctgctgaagagcagatgcagcagcatcggcatccaggtggagaccgccaccgacagcgacaccgagagcagaggcctgagagagtaccacagcgtgggcgtgcaggtggaggacgagaagagacacggcagattcaagagaagcaacagcgtgaccgccgccgtgcaggccgacctggagctggagggcttccccggccacatcaccaccgaggacaagggcctgcagttcggcagcagcttccagagacacagcgagcccagcacccccacccagtacagcgccgtgagaaccgtgagaacccagggcctgttcagctacagagaggactacagaacccaggtggacaccagcaccctgcccccccccgacccctggctggagcccgccatcgacaccgtggagaccggcagaatgagcccctgcagaagagacggcagctggttcctgaagctgctgcacgccgagaccaagagaatggagggctggtgcaaggagatggagagagaggccgaggagaacgacctgagcgaggagatcctgggcaagatcagaagcgccgtgggcagcgcccagctgctgatgagccagaagttccagcagttctactggctgtgccagcagaacatggaccccagcgccatgcccagacccaccagccaggacctggccggctactgggacatgctgcagctgagcatcgaggacgtgagcatgaagttcgacgagctgcagagactgagactgaacgactggaagatgatggagagccccgagagaaaggaggagagaaaggtgcccccccccatccccaagaagccccccaagggcaagttccccatcaccagagagaagagcctggacctgcccgacagacagagacaggaggccagaagaagactgatggccgccaagagagccgccagcttcagacagaacagcgccagcgagagagccgacagcatcgagatctacatccccgaggcccagaccagactgtag

SEQ ID NO: 344596 - DNA, 2937 bp, Artificial Sequence
  derived and/or modified sequence
tgacccacccagcacttcaacgaggagagatacagccccgcccccagaagcatgaagggcctgagcggcagcagaacccagccccccctgtgcagcggccacacctgcggcctggccccccccgaggactgcgagcacctgcaccacggccccgacgccagacccccctacctgctgagccccgccgacagctgccccggcggcagacacagatgcagccccagaagcagcgtgcacagcgagtgcgtgatgatgcccgtggtgctgggcgaccacgtgagcagcagcaccttccccagaatgcactacagcagccactacgacaccagagacgactgcgccgtggcccacgccggcgccaagatcaacagaatccccgccaacctgctggaccagttcgagaagcagctgcccctgcacagagacggcttccacaccctgcagtaccagagaaccagcgccgccgccgagcagagaagcgagagccccggcagaatcagacacctggtgcacagcgtgcagaagctgttcaccaagagccacagcctggagggcagcagcaagagcaacgccaacggcaccaaggccgacggcagagccgacgaccaccaccacgcccaccacgccaagcacagcaagagaagcaagagcaaggagagaaagcccgagggcaagcccagacccggcatgagcagctggtggagcagcgacgacaacctggacagcgacagcacctacagaacccccagcgtgctgaacagacaccacctgggccccgtggcccactgctaccccgacgccctgcagagccccttcggcgacctgagcctgaagaccagcaagagcaacaacgacgtgaagtgcagcgcctgcgagggcctggccctgacccccgacgccaagtacctgaagagaagcagctggagcaccctgaccgtgagccaggccaaggaggcctacagaaagagcagcctgaacctggacaagcccctgctgcaccaggacgccaagcccgccctgagaccctgccactacctgcaggtgccccaggacgagtggggcggctaccccaccggcggcaaggacgaggagatcccctgcagaagaatgagaagcggcagctacatcaaggccatgggcgacgaggagagcggcgagagcgacagcagccccaagaccagccccaagagcgccatcctgcccgagcccctgctgaagagcatcggccagagacccctgggcgagcaccagacccagacctacctgcaggccgccagcgacgtgcccgtgggccacagcctggaccccgccgccaactacaacagccccaagttcagaagcagaaaccagagctacatgagagccgtgagcaccctgagccaggccagctgcgtgagccaggtgagcgaggccgagatcaacggccagttcgagagcgtgtgcgagagcgtgttcagcgaggtggagagccaggccatggacgccctggacctgcccggctgcttcagaaccagaagccacagctacctgagagccatccaggccggctacagccaggacgacgagtgcatccccatgatgacccccagcgacatcaccagcaccatcagaagcaccgccgccgtgagctacaccaactacaagaagacccccccccccgtgccccccagaaccaccagcaagcccctgatcagcgtgaccgcccagagcagcaccgagagcacccaggacgcctaccaggacagcagagcccagagaatgagcccctggccccaggacagcagaggcctgtacaacagcaccgacagcctggacagcaacaaggccatgaacctggccctggagaccgccgccgcccagagacacctgcccgagagccagagcagcagcgtgagaaccagcgacaaggccatcctggtgagcaaggccgaggagctgctgaagagcagatgcagcagcatcggcatccaggtggagaccgccaccgacagcgacaccgagagcagaggcctgagagagtaccacagcgtgggcgtgcaggtggaggacgagaagagacacggcagattcaagagaagcaacagcgtgaccgccgccgtgcaggccgacctggagctggagggcttccccggccacatcaccaccgaggacaagggcctgcagttcggcagcagcttccagagacacagcgagcccagcacccccacccagtacagcgccgtgagaaccgtgagaacccagggcctgttcagctacagagaggactacagaacccaggtggacaccagcaccctgcccccccccgacccctggctggagcccgccatcgacaccgtggagaccggcagaatgagcccctgcagaagagacggcagctggttcctgaagctgctgcacgccgagaccaagagaatggagggctggtgcaaggagatggagagagaggccgaggagaacgacctgagcgaggagatcctgggcaagatcagaagcgccgtgggcagcgcccagctgctgatgagccagaagttccagcagttctactggctgtgccagcagaacatggaccccagcgccatgcccagacccaccagccaggacctggccggctactgggacatgctgcagctgagcatcgaggacgtgagcatgaagttcgacgagctgcagagactgagactgaacgactggaagatgatggagagccccgagagaaaggaggagagaaaggtgcccccccccatccccaagaagccccccaagggcaagttccccatcaccagagagaagagcctggacctgcccgacagacagagacaggaggccagaagaagactgatggccgccaagagagccgccagcttcagacagaacagcgccagcgagagagccgacagcatcgagatctacatccccgaggcccagaccagactgtag

SEQ ID NO: 344597 - DNA, 10090 bp, Artificial Sequence
  derived and/or modified sequence
gaggaagaagctggagacttggtccagccgggcatcagctttccggggccggcagaggaggatctagacccgcagtactcatggtcgcccacgcagcacttcaatgaggagcgctactcgcccgcgcccaggagcatgaagggcctttccggaagtcggacccagccgccgctgtgttccgggcacacgtgtggtctggcgcccccggaggactgcgagcacctgcaccacgggcccgacgcgcggccgccctacctgctgagccccgccgacagctgccccggggggcgccaccgctgctcgccgcgcagctcggtgcactcggagtgcgtgatgatgccggtggtgctgggcgaccacgtgtccagcagcaccttcccgcggatgcactacagctcgcactacgacacgcgcgacgactgcgctgtggcccacgcgggcgccaagatcaaccgcatcccggccaacctgctggaccagttcgagaagcagctgccgctgcaccgggacggcttccacacgctgcagtaccagaggacgtccgcggccgccgagcagcgcagcgagagccccgggcggatccgccacctggtacactccgtgcagaagctcttcaccaagtcgcactcgctggagggctcctccaaaagcaacgccaacggcaccaaggcggacggccgggcggacgaccaccaccacgcccaccacgccaagcacagcaagaggagcaagagcaaggagcgcaagccggagggcaagccccggcccggcatgagcagctggtggagctcggacgacaacctggacagcgacagcacctatcggacgcccagcgtgctcaaccggcaccacctgggccccgtggcccactgctaccccgacgcgctgcagagccccttcggggacctgtccctcaagacctccaagagcaacaacgacgtcaagtgctcggcctgtgaggggttggcgctgacgcccgacgccaagtacctgaagcgcagctcctggtctacgctgacggtcagccaggccaaggaggcctaccgcaagagctcgctgaacctggacaagccgctgctgcaccaggacgccaagcccgccctgaggccgtgccactacctccaggtacctcaggatgagtggggagggtaccccaccggtggcaaagatgaggagattccctgcaggagaatgagaagtgggagttacattaaagccatgggggacgaggagagcggagagtcagactccagccccaagacatcaccaaagtcggcaatcctaccagagccgctgctgaagtccatcggacagagaccgcttggagagcaccagacccagacctacctgcaagctgcaagcgatgtgcctgtgggacacagcctggaccccgctgcgaactacaactccccgaaattccgctcccggaaccagagctacatgagggccgtcagcaccctgagccaggccagctgcgtgagccaggtgagcgaggcggagatcaatgggcaattcgagtccgtgtgcgagtccgtcttcagtgaagttgaatctcaggccatggatgccctcgacctcccgggatgtttccgaacaaggagtcacagctaccttcgagccattcaagccggctactcccaagatgacgaatgtattcccatgatgacaccctctgacatcacctccaccatcaggtcaacagcagctgtctcatatacaaattacaagaaaacgcccccaccggtgccccctcggaccacctccaagcctctgatctcggtgacggcgcagagcagcaccgaatccacccaggacgcctaccaggacagccgcgcacagaggatgtccccgtggccccaggacagccgcggcctctacaactccacggacagcctggacagcaacaaggccatgaacctcgcgctggaaacggccgctgcccagcgccacctgccagagagccagagcagctctgtgcggaccagcgacaaggccatcctggtgtccaaggcggaggagctcctcaagagccgctgctcctccatcgggattcaggtggaaacggccacagattctgacacggagagccgcggtctgcgggaataccactctgtcggggtgcaagtggaagatgagaagcgacacggacgttttaaacgttctaacagcgtcacggccgccgtccaagctgacctggagctggaggggttcccaggccacatcaccacggaggacaaaggccttcagttcggctcatccttccagcggcactccgagcccagcacccccacccagtacagcgcggtgagaactgtacggacccaggggctcttcagctatagagaagactatcggacccaagtggacacctccaccctgccccctccagacccctggctggagcccgccatcgacacggtagagactgggaggatgtctccgtgccgcagggatggctcgtggtttttgaagctgctgcacgcagagacaaagaggatggaaggctggtgcaaagagatggagagagaggcggaggagaacgacctctcggaggaaattctcggtaaaatcaggagtgctgttgggagtgcccagcttctcatgtcccagaaattccagcagttttattggctttgccaacagaatatggaccccagcgccatgccgaggccgacgtcgcaggacctggccggctactgggacatgctgcagctctccattgaggacgtcagcatgaagttcgacgagctgcagcggctgcggctcaacgactggaagatgatggagtccccggaaagaaaggaagaaagaaaggtcccgcctccaataccaaagaagcctcccaaggggaagtttcccatcacaagagaaaaatccctggacctgcccgacagacaacgccaggaagcccggaggcgcctcatggccgccaagcgagcggcgtccttccggcagaattccgcctccgagcgcgcggacagcatcgagatctacatccccgaggcccagacccggctctgagggcggaggccggcgccttcccctcgtcgcttccgctttcccggacgcttgtgcagcgcggcgccgccctggtggtttctgtctcctcctcccgctgaacacgtcctcgctcccgcgctccccgcgccccggacacagcgggacgcggccggcggcctcagagtccacggagctcgcggcgaggacgacttctgcttttgttgttgttgttgttgttcacgggtggcctggctcacacttggctctgagggacaggtgtggcgagacctgatttctcctgcgtgttctcagaggacggcgagaaatgcctctggagctggaacccagcttacattttgttatttctatttttataaattgtgtgataattagaggtaagaataacaagtaactataaacgggtgcatcccaccactccctggaggcattagacacccaagtggaaggtgctacaacctgaagcgcaggaaagaaaggcccattcccctcgcacagccgagcttttactccctgagcacgggccgctccgctcccctgctcctgtctgtctcggacagaaaacacgaggctccttgtgtcaagcttcctgtgatggaaagcgacctctccaaccaccacactccccgccgtacagttctccagaatcccaggcgatgacaagtctgaacccacgaaaatacccagcgcagcatctacacattcaaaagataagctgagtgttcccaccaggaagtcacgcgcagagaggagagtcttacggagggctgggagcttaaaaggaaaacaatgtccttacttgtaaacagttattgtattttttatttctttctaacttaaaatacgacacccagtattttctttaagtttcaccatttacgctacatgtgatttttttaatgtatgtatatatatatattctcaaattgctctatcagctgacttttcagggtatccttaaaaaaaaacacacacgaaaaacaaaagtttgcttgtttaaaatgacagttgtgatgtaaaaagtttaagaaatatgaatgtgagtggtaagtatatctcagtttaaatggtaaagaagaaatgtagtttacatttgtatttttccagaattcttttgtcctatgcagtattgctaaagtcgagaatatattccttgcctgtgttagacatgaagggaaaaagaggtcacatattgtgatttccagctgtagcattcaaaaaaaaaattggtgttcatgactctgtggtcggtgccagaggaaaataggaacgactctaattaataggctttctgtgtatataattaaatttagctgctgcaaccattgttctgacacgacttctgtttcacagttcagaccggtcttcaaaggaaaagcctgtccgatttttccatgggttccagtttcagagttctcattattactcaaagtaaaagcggactgcgatttaagatgtttccaccccaatacctggtcttccttcccggcttaaggagtaccatgtacttagccacaggcagaatagctttcgatgaccccatagcactttgtttcttcgccttgatttgcactttacaatgtccccagcccctctgcagcccgtggctggcagggcgttcgatgtgcggttggcccccagcgcgccctccagagctgcggtgtctccctgcctcattccccacatcccactgagcatgggaccattgggagcagagctgatattaaagcatgtttagcttcgaagttttacttttttaaagctgagtagttaagaattccctgtaaaaacaaaaccctgtaaattgagcctcatgtctggtatatattttaccaaacagccttaaaatatatttggaagcaaaaatcagtacgaatgtatctccttgaaaaatgcaaaaaaaaaaaaatccctgaaatattcttctataaatgaatcctatttccccagagtgttcaaggcatttttctacctaaatgaatacctaaatcttgagtagtgtacggtaatgacgcttcttcctatatccactcttattatgttaaaacaaatgtatttgcgagtattggcattttagactttaaaaatgctgtatgatttcagatgaactctgctgtttagaagtaaccacagaaaagcaaagtcagtgtacactctgagtgaaaggaaatgtaatgtggataaaggcccgccacctcctcacattggtctatctactggcagctgatacgtttaactcatttccttgagcttatacaaaacatagaaaagcaaactgttaaagtagtcaataattatttgtctcagatcccagattctatgatccctgcttaaaagaaaatgttcactgcatgtaggttgatttcttatgttttgtagactcattgttatttttcaatccccaaaagtcttggcctaaaccatccctaggggagcagattaacctaccactacattgcacagggttggtgactcgacgtggtgaatgtgcacacgccctgcctggtccgccatgttccaaagaagatgatttaatggtagaacggatacctgctgctagacctgatggaatgttacctgtccgtgttacataatcaagtgcaatatactcagttctcatgcaggtgacattctaccatgaaacgcagaagataagccatgtttctgtattgtacatgtaaagaaaaataaaactgtttatgatacttgtgttagtcactcgagctagcttatttcagccacttctagcagatcatgccatggagctcacgacgtgtgaccatttcgtcatatttaaaatataacttcaagaaaagagtaaacatccattggagaacacggctgaaaattattgtgctgttctaggaacatcatcctagagagtgtgatgttcactataaccccatacctacattccctaatgatacagccaatgacaggtgaaacccagacactctccttagagccgacaggttgatcctgctgtgttgaaggctgtggttaataaaacacaagtatgataaacaggacctagcgtttagcccgggaaaggagaatgctgcttgtcacctagagtgctttccttgtgatgcgtctctcgcatcttcacgtgttgttgtgtttgaagtaaaactagttgttatcgatgacaatttttaccatagttttctcagcaaatttatatcaccatcttagaatggtatataaaaaaattgaactgtttatgataccaaaaaaattacagttttgtttaaaaggaaatgttgatgttttcaactccaaatcaattctaaaaacttcaagcacttaatggaaaggtaaatggtcagataaaaatataattacctgtaaggttatctggttttaaaagaaaaaaaaaaagcctacaaactcagtgacctactacgcagagggaatttttccctgctgcttcttatgaaagtggccaggtttattattagaagacacagtggcagagcacacatgtgcacaggttctgattatttctcttggagcatatgtccttgtcttgatttttgccttttcgatgccatattaagcagccaccgtttccacccctttcattagaaggccctgcatccgtaaattcgcgcatctctgtttttgttagatccttgtaagcatcgctacccgagtccaggatggaatttcacaggaaagtgaagggatactgcaggcctgtgtttgcagcgcctgtggtaactgtggaatgagctctgttagggacagttgtctggtttgtgccaaaccttcgaggggcgagtagggagtgggggaggtgggtccaagtctccctcaggaaggccttttctatcggcagcaattccatcaagccaagcctcctgtggtcctgagcatgaaggggccaggggacctcctgggagatgcagcttttgtttccgctgcgtttcatcagtcagccttgcttggaattctggcaggttccccggggtgtttcagtggacaggaggcccccgtgccgtggctgagtcagcctgggtaccccagtcaccagcagggccacccttgatgacagggccccccacgaacctgggaaaggcagcgggaaatgtgtgagagggtgtgcgctggtacggacataaaagcattgtccaaaacagcgctggttcggggagggcccctggatactgcctttggcccacactgaaaactgaaattgccccacctgtgagcacagaaacacgcttctccaacacgggccgaaataactaaactccacatggttcctgcctgctcatttcccagccctcttcttctcaagcctgaacttcatttttttttttagctgcaaatttaacaggctaatttaaaactgcagttttcagacgacagcccctgggaatgttccagggttctcttgttttgatctgcatgtctgtttacacttctctgtaggcgtgggttgaatacaagtttccaaaactttaaaatagaaaaccacgagcttaagaggtgaaaaagatgacccctttctgattaggatctgtaactctgtgggctgggtcaatgcagtgtgcttcattcagggccatgtggcagccatgacacacaccacataaggtcagctcagagcccatggcttccctgcaggagccccatcttgtcgctattagttgggagttgcaatacattgttggccataaacaaagtgctaaaggaaagggtttgcttctacacattcggctgaatgtcccccagtgcagggtggcagcagaatgttctggaaatgaaggagatattgctaggaatctctaggctgttaggcaacctggcttttattcatcctcagccggcaactcatctcaagtttatgtctcagtttttttcctctagaaaggggattacagttcctgtccctgtcttcctccaggacacactgtgaggattaatgacatattggctctaaagtcctttgagctcctgggaacaggtggtgaaagtgtgcgttactgctaaggattagtccctggcctcttctagaatgccgccctcccagctctgcagggcacgctgccagaatccaggctggtcgtaaacatctcagagataatcagggaccaccagaggcagaggccatgagactgtctttggaaaggtttggaaatgcagaaataactacaagggccattctccttagcttctggctttcaactgtttctagatgcttccaagaacaagaacccagcaccaaccagaattaggccacgttttcaccattacttaagctcaatcgcctcttagatgaaatgaggagataaactaaacattaaaatgatgaaggaaaaaaaattatttggaagccgaaaaccgcatgggtggggaaacatcaggaacgaaatcagacacactgactcaaaccacgcaagggtttgagaagcccacccctctaattccaggcgtttgtaatttttctacttcgcacttgagagaaggcagaggtggtccgtgggaaagctccgggaaacagccgtctttcatccttgccacattgaaaaatgtccacaattttatgaattgctgtcctaaccctggcgtttttatccagtgttaaaataaattatttcaagtttcaatgtaaacacttaacagatgacttctttgcagaagaaatgttcgttacctactatcaaactactttttaacagattttgtatatacacacacaagttgacagaggtttacctccctactttcttagattttatgtaactcttttcattggtgcttattcagaacctgaaagccttgggcatccaagctttcacctactcaatggaggagaggtgataatgaatgaaaagattgacaccaggtttcttggacaaatttaagttcaaatttatctctttcaagtagaccatggtctccctagagagtgtgttggcttgtgtctgccagtacgacaaaggacgctcccagcttgatcgtggtaccttatggaagccactcacgcattctctgatttacccccaaaacactaccatgccccagccccactcatttaaataatacaatcatatcactttcaaagggctcagcacgaatgttcccctcactccactttttaactcgtttgctgaactcgacaaggcttccccttacgagcagtgagacctaggctactttcgaacgcttccttccgaacggtaagccacttcgctctcgggcaggacaggtcctccctgcagagagagacaactcatcccccgaccttccatactacagaccaaaatacccaggtgtggcctaaggactatattaaatgcctcctatagaaattcaaggaatgttagaaccaggaaactagctgtttaaagttttaaagaagtatataaatatatatataaatataaatatgaaatcatatcgagtgtgaggatgagcagagtgccaaatattcagcatctgtacaaagtcattcactggaattcaactattttatgtcattctctttctcacgcttttatggttcttttgataaattctatttagtagcatgcaggatacctaatctgaatgtgcaatatgctattcatcaccacgacaatttcttacttcctcttaataacttaccagaatgttggtcattcctttaaggcagttaaggattgctttatttgtgttcttttttcccatgactttttttcactctcagctgactgtaagaaactgtgcaccgtttccgccataaccgtcctgtgacgatgcctccatttgacttctgtatcgctgatgttcacctcctgtaaatagtttggcaattaaattttttgagaaaagtaatgtttacttttttattggagtgaattctcgtgttattttaatctcagaaaaattatatagaccaaagagttttatccgaaaaaaaattacactcttcctccattatatatttcattgttgaaatatcctcaatttctctatattttaagaagtaatggacatttattaaggttacagatttaatatgtatgcaaaatggtatagattaaatgagtttttaattaataaatcctacagtatttagtta

SEQ ID NO: 344598 - DNA, 3515 bp, Artificial Sequence
  derived and/or modified sequence
cgcccacgcagcacttcaatgaggagcgctactcgcccgcgcccaggagcatgaagggcctttccggaagtcggacccagccgccgctgtgttccgggcacacgtgtggtctggcgcccccggaggactgcgagcacctgcaccacgggcccgacgcgcggccgccctacctgctgagccccgccgacagctgccccggggggcgccaccgctgctcgccgcgcagctcggtgcactcggagtgcgtgatgatgccggtggtgctgggcgaccacgtgtccagcagcaccttcccgcggatgcactacagctcgcactacgacacgcgcgacgactgcgctgtggcccacgcgggcgccaagatcaaccgcatcccggccaacctgctggaccagttcgagaagcagctgccgctgcaccgggacggcttccacacgctgcagtaccagaggacgtccgcggccgccgagcagcgcagcgagagccccgggcggatccgccacctggtacactccgtgcagaagctcttcaccaagtcgcactcgctggagggctcctccaaaagcaacgccaacggcaccaaggcggacggccgggcggacgaccaccaccacgcccaccacgccaagcacagcaagaggagcaagagcaaggagcgcaagccggagggcaagccccggcccggcatgagcagctggtggagctcggacgacaacctggacagcgacagcacctatcggacgcccagcgtgctcaaccggcaccacctgggccccgtggcccactgctaccccgacgcgctgcagagccccttcggggacctgtccctcaagacctccaagagcaacaacgacgtcaagtgctcggcctgtgaggggttggcgctgacgcccgacgccaagtacctgaagcgcagctcctggtctacgctgacggtcagccaggccaaggaggcctaccgcaagagctcgctgaacctggacaagccgctgctgcaccaggacgccaagcccgccctgaggccgtgccactacctccaggtacctcaggatgagtggggagggtaccccaccggtggcaaagatgaggagattccctgcaggagaatgagaagtgggagttacattaaagccatgggggacgaggagagcggagagtcagactccagccccaagacatcaccaaagtcggcaatcctaccagagccgctgctgaagtccatcggacagagaccgcttggagagcaccagacccagacctacctgcaagctgcaagcgatgtgcctgtgggacacagcctggaccccgctgcgaactacaactccccgaaattccgctcccggaaccagagctacatgagggccgtcagcaccctgagccaggccagctgcgtgagccaggtgagcgaggcggagatcaatgggcaattcgagtccgtgtgcgagtccgtcttcagtgaagttgaatctcaggccatggatgccctcgacctcccgggatgtttccgaacaaggagtcacagctaccttcgagccattcaagccggctactcccaagatgacgaatgtattcccatgatgacaccctctgacatcacctccaccatcaggtcaacagcagctgtctcatatacaaattacaagaaaacgcccccaccggtgccccctcggaccacctccaagcctctgatctcggtgacggcgcagagcagcaccgaatccacccaggacgcctaccaggacagccgcgcacagaggatgtccccgtggccccaggacagccgcggcctctacaactccacggacagcctggacagcaacaaggccatgaacctcgcgctggaaacggccgctgcccagcgccacctgccagagagccagagcagctctgtgcggaccagcgacaaggccatcctggtgtccaaggcggaggagctcctcaagagccgctgctcctccatcgggattcaggtggaaacggccacagattctgacacggagagccgcggtctgcgggaataccactctgtcggggtgcaagtggaagatgagaagcgacacggacgttttaaacgttctaacagcgtcacggccgccgtccaagctgacctggagctggaggggttcccaggccacatcaccacggaggacaaaggccttcagttcggctcatccttccagcggcactccgagcccagcacccccacccagtacagcgcggtgagaactgtacggacccaggggctcttcagctatagagaagactatcggacccaagtggacacctccaccctgccccctccagacccctggctggagcccgccatcgacacggtagagactgggaggatgtctccgtgccgcagggatggctcgtggtttttgaagctgctgcacgcagagacaaagaggatggaaggctggtgcaaagagatggagagagaggcggaggagaacgacctctcggaggaaattctcggtaaaatcaggagtgctgttgggagtgcccagcttctcatgtcccagaaattccagcagttttattggctttgccaacagaatatggaccccagcgccatgccgaggccgacgtcgcaggacctggccggctactgggacatgctgcagctctccattgaggacgtcagcatgaagttcgacgagctgcagcggctgcggctcaacgactggaagatgatggagtccccggaaagaaaggaagaaagaaaggtcccgcctccaataccaaagaagcctcccaaggggaagtttcccatcacaagagaaaaatccctggacctgcccgacagacaacgccaggaagcccggaggcgcctcatggccgccaagcgagcggcgtccttccggcagaattccgcctccgagcgcgcggacagcatcgagatctacatccccgaggcccagacccggctctgagggcggaggccggcgccttcccctcgtcgcttccgctttcccggacgcttgtgcagcgcggcgccgccctggtggtttctgtctcctcctcccgctgaacacgtcctcgctcccgcgctccccgcgccccggacacagcgggacgcggccggcggcctcagagtccacggagctcgcggcgaggacgacttctgcttttgttgttgttgttgttgttcacgggtggcctggctcacacttggctctgagggacaggtgtggcgagacctgatttctcctgcgtgttctcagaggacggcgagaaatgcctctggagctggaacccagcttacattttgttatttctatttttataaattgtgtgataattagaggtaagaataacaagtaactataaacgggtgcatcccaccactccctggaggcattagacacccaagtggaaggtgctacaacctgaagcgcaggaaagaaaggcccattcccctcgcacagccgagcttttactccctgagcacgggccgctccgctcccctgctcctgtctgtctcggacagaaaacacgaggctccttgtgtc

SEQ ID NO: 344599 - protein, 199 aa, Artificial Sequence
  derived and/or modified sequence
MTNSRKCWPMGCTAGAHSLDPHPRLCSLLCIGEFCGRDGCSADERFDATFHTNVLVNSSGHCQYLPPGIFKSSCYIDVRWFPFDVQHCKLKFGSWSYGGWSLDLQMQEADISGYIPNGEWDLVGIPGKRSERFYECCKEPYPDVTFTVTMRRRTLYYGLNLLIPCVLISALALLVFLLPADSGEKISLGITVLLSLTVF

SEQ ID NO: 344600 - DNA, 600 bp, Artificial Sequence
  derived and/or modified sequence
atgacaaattctcgcaagtgttggccaatggggtgcaccgccggtgcacactctctggatcctcacccacgcctatgcagtttgctgtgtatcggggaattttgcggccgtgacggctgctccgccgacgaacgtttcgatgccacatttcacaccaatgtcctggtgaactctagcggccattgccagtacttgccccctgggatctttaaatctagctgttacattgatgtaaggtggttcccatttgacgtgcaacactgcaaactgaaatttgggtcttggtcttacggcggttggtccctggacctgcaaatgcaagaggcggacatttctggctacatccccaacggcgagtgggacttagtgggcatccccggaaaacggtccgaaagattttacgagtgctgcaaagaaccctatcctgatgtcacattcactgtgaccatgaggcgtcgaacactctattacggcctcaatctgctgatcccatgcgtcctcataagtgcactcgcgctgttagtctttctcttaccggcagattccggcgagaaaatatcactgggcataacagtcttgttatccctaacagtgttttag

SEQ ID NO: 344601 - DNA, 600 bp, Artificial Sequence
  derived and/or modified sequence
atgaccaacagcaggaagtgctggcccatgggctgcacagctggggcccacagcctggacccccacccccggctgtgcagcctgctgtgcattggagagttctgtggcagagatggctgcagcgcagatgaaagatttgatgccaccttccacaccaacgtgctggtgaacagcagcggccactgccagtacctgcccccaggcatcttcaagagcagctgctacattgatgtgcgctggttcccctttgatgtgcagcactgcaagctgaagtttggctcctggagctatggaggctggagcctggacctgcagatgcaggaggccgacatcagcggctacatccccaatggagagtgggacctggtgggcatccctgggaagaggtctgagcgcttctatgagtgctgcaaggagccctacccagatgtgaccttcaccgtgaccatgagaagaaggaccctgtactacggcctgaacctgctgatcccctgtgtgctgatcagcgccctggccctgctggtgttcctgctgcctgctgacagcggggagaagatcagcctgggcatcaccgtgctgctgagcctgactgtgttctag

SEQ ID NO: 344602 - DNA, 600 bp, Artificial Sequence
  derived and/or modified sequence
atgaccaacagccggaagtgctggcccatgggctgcaccgccggcgcccattccctggatccccacccccggctgtgctctctactgtgcattggggagttctgtggtagagacggttgtagtgcagacgaacggtttgatgctaccttccataccaatgttttggtgaactcttcaggacactgccagtacctacctcctggaatttttaaatcttcctgctatattgacgtgcgttggtttccatttgatgtgcagcactgtaagctgaaattcggttcttggtcttatggcgggtggtctttggacctccagatgcaagaggcagatattagtggctacatccccaatggcgagtgggacttggtgggaatacccggcaaaaggagcgagcgtttttatgagtgctgcaaggaaccctatccagatgtaaccttcacagtcacgatgcgccggcggaccctgtactatggcctgaacctgctcattccctgtgtgttgatctctgcgttagccctgctcgtgtttctgctgccagcggactctggcgagaaaatatcccttggaataaccgtgctgctatctttgaccgtattttag

SEQ ID NO: 344603 - DNA, 600 bp, Artificial Sequence
  derived and/or modified sequence
atgactaattcccgcaaatgctggccaatgggctgcacggccggtgcccatagcctcgatccccatccacggctgtgtagtttgttatgcatcggagaattttgtgggagggacggatgttccgccgacgagagatttgatgctaccttccacacgaatgtcttggtcaatagtagcggccactgccagtacctgcctccaggcatcttcaagtccagttgttatatagatgtgagatggttcccattcgacgttcaacactgtaaattaaagtttgggtcatggtcatacggcggatggtccctggacctgcaaatgcaggaagccgatatttccggctacatccctaacggtgaatgggatcttgtgggaattccaggcaaacggtccgagcgtttctatgagtgctgcaaggaaccttacccagacgtgacattcaccgtgacaatgaggagaagaactctgtattacggattgaacttacttattccttgtgttctcattagtgccctggccctgttagttttccttcttcctgccgattccggggaaaaaataagccttggcatcaccgtactgctctccttgacagtgttctag

SEQ ID NO: 344604 - DNA, 1855 bp, Artificial Sequence
  derived and/or modified sequence
atgaccaacagcaggaagtgctggcctatgggatgcactgctggagcccacagtttggacccacatcctcgtctatgttccctgttgtgcattggagagttctgtggcagagatggctgcagtgctgatgagcgctttgacgccacattccacactaacgtgttggtgaattcttctgggcattgccagtacctgcctccaggcatattcaagagttcctgctacatcgatgtacgctggtttccctttgatgtgcagcactgcaaactgaagtttgggtcctggtcttacggaggctggtccttggatctgcagatgcaggaggcagatatcagtggctatatccccaatggagaatgggacctagtgggaatccccggcaagaggagtgaaaggttctatgagtgctgcaaagagccctaccccgatgtcaccttcacagtgaccatgcgccgcaggacgctctactatggcctcaacctgctgatcccctgtgtgctcatctccgccctcgccctgctggtgttcctgcttcctgcagattccggggagaagatttccctggggataacagtcttactctctcttaccgtcttcatgctgctcgtggctgagatcatgcccgcaacatccgattcggtaccattgatagcccagtacttcgccagcaccatgatcatcgtgggcctctcggtggtggtgacagtgatcgtgctgcagtaccaccaccacgaccccgacgggggcaagatgcccaagtggaccagagtcatccttctgaactggtgcgcgtggttcctgcgaatgaagaggcccggggaggacaaggtgcgcccggcctgccagcacaagcagcggcgctgcagcctggccagtgtggagatgagcgccgtggcgccgccgcccgccagcaacgggaacctgctgtacatcggcttccgcggcctggacggcgtgcactgtgtcccgacccccgactctggggtagtgtgtggccgcatggcctgctcccccacgcacgatgagcacctcctgcacggcgggcaaccccccgagggggacccggacttggccaagatcctggaggaggtccgctacattgccaaccgcttccgctgccaggacgaaagcgaggcggtctgcagcgagtggaagttcgccgcctgtgtggtggaccgcctgtgcctcatggccttctcggtcttcaccatcatctgcaccatcggcatcctgatgtcggctcccaacttcgtggaggccgtgtccaaagactttgcgtaaccacgcctggttctgtacatgtggaaaactcacagatgggcaaggcctttggcttggcgagatttgggggtgctaatccaggacagcattacacgccacaactccagtgttcccttctggctgtcagtcgtgttgcttacggtttctttgttactttaggtagtagaatctcagcactttgtttcatattctcagatgggctgatagatatccttggcacatccgtaccatcggtcagcagggccactgagtagtcattttgcccattagcccactgcctggaaagcccttcggagagctccccatggctcctcaccaccgagacagttggttttgcatgtctgcatgaaggtctacctgaaaattcaacatttgctttttgcttgtgtacaaacccagattgaagctaaaataaaccagactcactaaatcctttccaataattgactggtggaaggaaaacaaaaaacaaaaactaaaaacctcttagcttttctgcaattcaactttttatttttatttttatttctatcaaagacggtagagagaaacagcttgatgctgtttctacatt

SEQ ID NO: 344605 - DNA, 600 bp, Artificial Sequence
  derived and/or modified sequence
atgaccaacagcagaaagtgctggcccatgggctgcaccgccggcgcccacagcctggacccccaccccagactgtgcagcctgctgtgcatcggcgagttctgcggcagagacggctgcagcgccgacgagagattcgacgccaccttccacaccaacgtgctggtgaacagcagcggccactgccagtacctgccccccggcatcttcaagagcagctgctacatcgacgtgagatggttccccttcgacgtgcagcactgcaagctgaagttcggcagctggagctacggcggctggagcctggacctgcagatgcaggaggccgacatcagcggctacatccccaacggcgagtgggacctggtgggcatccccggcaagagaagcgagagattctacgagtgctgcaaggagccctaccccgacgtgaccttcaccgtgaccatgagaagaagaaccctgtactacggcctgaacctgctgatcccctgcgtgctgatcagcgccctggccctgctggtgttcctgctgcccgccgacagcggcgagaagatcagcctgggcatcaccgtgctgctgagcctgaccgtgttctag

SEQ ID NO: 344606 - DNA, 1785 bp, Artificial Sequence
  derived and/or modified sequence
cgtggagcgcgccggctcgctgcagctccgggactcaacatgcgctgctcgccgggaggcgtctggctggcgctggccgcgtcgctcctgcacgtgtccctgcaaggcgagttccagaggaagctttacaaggagctggtcaagaactacaatcccttggagaggcccgtggccaatgactcgcaaccactcaccgtctacttctccctgagcctcctgcagatcatggacgtggatgagaagaaccaagttttaaccaccaacatttggctgcaaatggcatattcaagagttcctgctacatcgatgtacgctggtttccctttgatgtgcagcactgcaaactgaagtttgggtcctggtcttacggaggctggtccttggatctgcagatgcaggaggcagatatcagtggctatatccccaatggagaatgggacctagtgggaatccccggcaagaggagtgaaaggttctatgagtgctgcaaagagccctaccccgatgtcaccttcacagtgaccatgcgccgcaggacgctctactatggcctcaacctgctgatcccctgtgtgctcatctccgccctcgccctgctggtgttcctgcttcctgcagattccggggagaagatttccctggggataacagtcttactctctcttaccgtcttcatgctgctcgtggctgagatcatgcccgcaacatccgattcggtaccattgatagcccagtacttcgccagcaccatgatcatcgtgggcctctcggtggtggtgacagtgatcgtgctgcagtaccaccaccacgaccccgacgggggcaagatgcccaagtggaccagagtcatccttctgaactggtgcgcgtggttcctgcgaatgaagaggcccggggaggacaaggtgcgcccggcctgccagcacaagcagcggcgctgcagcctggccagtgtggagatgagcgccgtggcgccgccgcccgccagcaacgggaacctgctgtacatcggcttccgcggcctggacggcgtgcactgtgtcccgacccccgactctggggtagtgtgtggccgcatggcctgctcccccacgcacgatgagcacctcctgcacggcgggcaaccccccgagggggacccggacttggccaagatcctggaggaggtccgctacattgccaaccgcttccgctgccaggacgaaagcgaggcggtctgcagcgagtggaagttcgccgcctgtgtggtggaccgcctgtgcctcatggccttctcggtcttcaccatcatctgcaccatcggcatcctgatgtcggctcccaacttcgtggaggccgtgtccaaagactttgcgtaaccacgcctggttctgtacatgtggaaaactcacagatgggcaaggcctttggcttggcgagatttgggggtgctaatccaggacagcattacacgccacaactccagtgttcccttctggctgtcagtcgtgttgcttacggtttctttgttactttaggtagtagaatctcagcactttgtttcatattctcagatgggctgatagatatccttggcacatccgtaccatcggtcagcagggccactgagtagtcattttgcccattagcccactgcctggaaagcccttcggagagctccccatggctcctcaccaccgagacagttggttttgcatgtctgcatgaaggtctacctgaaaattcaacatttgctttttgcttgtgtacaaacccagattgaagctaaaataaaccagactcact

SEQ ID NO: 344607 - DNA, 447 bp, Artificial Sequence
  derived and/or modified sequence
atgaggtgtagccccggtggcgtatggctagccctggccgcctctctgctgcacgtttctttgcagggcgaatttcaaagaaaactatacaaagaactggttaagaactacaaccctttagagaggccagtggccaacgattcacagccattgacagtttactttagtttaagtctgctccagattatggatgtggatgagaagaaccaagtgcttaccactaacatctggctccagatgtcgtggaccgaccattatctgcaatggaacgtgtcggaataccccggagttaagaccgtgaggttcccagacggacaaatctggaagccagatattctgctgtataattcctcctatgaccagcagcaggaagtgctggcctatgggatgcattgctggagtccccagttcggccctacctctagcagcatgtttcccgtcgtgtag

SEQ ID NO: 344608 - DNA, 447 bp, Artificial Sequence
  derived and/or modified sequence
atgcgctgcagccctggaggagtgtggctggccctggccgccagcctgctgcacgtgtccctgcagggcgagttccagaggaagctgtacaaggagctggtgaagaactacaaccccctggagaggcctgtggccaatgacagccagcccctgactgtgtacttcagcctgagcctgctgcagatcatggatgtggatgagaagaaccaggtgctgaccaccaacatctggctgcagatgtcctggacagaccactacctgcagtggaatgtgtctgagtacccaggagtgaagacagtgcgcttcccagatggccagatctggaagccagacatcctgctgtacaacagcagctatgaccagcagcaggaggtgctggcctacggcatgcactgctggagcccccagtttggccccaccagcagctccatgtttcctgtggtgtag

SEQ ID NO: 344609 - DNA, 447 bp, Artificial Sequence
  derived and/or modified sequence
atgcggtgcagccccggcggcgtgtggctggccctggccgccagcctgctgcatgtgagcctgcaaggcgagttccagcgcaaactatataaggaactcgttaaaaattacaacccactggagcgccccgttgccaacgatagccagccattaacagtgtattttagcctgagccttctccagatcatggatgttgacgaaaagaaccaggtattgactacgaacatttggctgcaaatgtcatggacagatcattacctgcaatggaacgtgtccgagtatccgggcgtgaaaacagttaggttccccgatggtcaaatctggaaaccagatatactgttgtacaattctagttacgaccagcagcaggaagttttggcctatgggatgcactgctggagcccacagttcggcccaaccagtagttcgatgttccctgtcgtctag

SEQ ID NO: 344610 - DNA, 447 bp, Artificial Sequence
  derived and/or modified sequence
atgaggtgctccccagggggtgtgtggcttgcactagccgctagtctcttgcatgtgtcactacaaggggaatttcagaggaaattgtacaaagagcttgtcaaaaactataaccccctggaacgccctgtagcgaatgactcccagcctctaaccgtatacttctccctgtcactgctgcagatcatggacgtggacgaaaaaaaccaggtgctgaccaccaacatctggctgcagatgtcttggacagatcactacctgcagtggaatgtgagcgaatacccaggggttaaaaccgtgcgcttcccagatggccagatctggaaacctgatatactgctctacaacagctcatacgatcagcaacaagaggtgctcgcttatgggatgcattgttggtcgcctcagttcggcccaacatcttcttccatgtttcctgttgtatag

SEQ ID NO: 344611 - DNA, 516 bp, Artificial Sequence
  derived and/or modified sequence
ggccgcaggcgcaggcccgggcgacagccgagacgtggagcgcgccggctcgctgcagctccgggactcaacatgcgctgctcgccgggaggcgtctggctggcgctggccgcgtcgctcctgcacgtgtccctgcaaggcgagttccagaggaagctttacaaggagctggtcaagaactacaatcccttggagaggcccgtggccaatgactcgcaaccactcaccgtctacttctccctgagcctcctgcagatcatggacgtggatgagaagaaccaagttttaaccaccaacatttggctgcaaatgtcttggacagatcactatttacagtggaatgtgtcagaatatccaggggtgaagactgttcgtttcccagatggccagatttggaaaccagacattcttctctataacagcagttatgaccaacagcaggaagtgctggcctatgggatgcactgctggagcccacagtttggacccacatcctcgtctatgttccctgttgtg

SEQ ID NO: 344612 - DNA, 447 bp, Artificial Sequence
  derived and/or modified sequence
atgagatgcagccccggcggcgtgtggctggccctggccgccagcctgctgcacgtgagcctgcagggcgagttccagagaaagctgtacaaggagctggtgaagaactacaaccccctggagagacccgtggccaacgacagccagcccctgaccgtgtacttcagcctgagcctgctgcagatcatggacgtggacgagaagaaccaggtgctgaccaccaacatctggctgcagatgagctggaccgaccactacctgcagtggaacgtgagcgagtaccccggcgtgaagaccgtgagattccccgacggccagatctggaagcccgacatcctgctgtacaacagcagctacgaccagcagcaggaggtgctggcctacggcatgcactgctggagcccccagttcggccccaccagcagcagcatgttccccgtggtgtag

SEQ ID NO: 344613 - protein, 752 aa, Artificial Sequence
  derived and/or modified sequence
TTAMAHRKLESVGSGMLDHRVRPGPVPHSQEPESEDMELPLEGYVPEGLELAALRPESPAPEEQECHNHSPDGDSSSDYVNNTSEEEDYDEGLPEEEEGITYYIRYCPEDDSYLEGMDCNGEEYLAHSAHPVDTDECQEAVEEWTDSAGPHPHGHEAEGSQDYPDGQLPIPEDEPSVLEAHDQEEDGHYCASKEGYQDYYPEEANGNTGASPYRLRRGDGDLEDQEEDIDQIVAEIKMSLSMTSITSASEASPEHGPEPGPEDSVEACPPIKASCSPSRHEARPKSLNLLPEAKHPGDPQRGFKPKTRTPEERLKWPHEQVCNGLEQPRKQQRSDLNGPVDNNNIPETKKVASFPSFVAVPGPCEPEDLIDGIIFAANYLGSTQLLSERNPSKNIRMMQAQEAVSRVKRMQKAAKIKKKANSEGDAQTLTEVDLFISTQRIKVLNADTQETMMDHALRTISYIADIGNIVVLMARRRMPRSASQDCIETTPGAQEGKKQYKMICHVFESEDAQLIAQSIGQAFSVAYQEFLRANGINPEDLSQKEYSDIINTQEMYNDDLIHFSNSENCKELQLEKHKGEILGVVVVESGWGSILPTVILANMMNGGPAARSGKLSIGDQIMSINGTSLVGLPLATCQGIIKGLKNQTQVKLNIVSCPPVTTVLIKRPDLKYQLGFSVQNGIICSLMRGGIAERGGVRVGHRIIEINGQSVVATAHEKIVQALSNSVGEIHMKTMPAAMFRLLTGQETPLYI

SEQ ID NO: 344614 - protein, 749 aa, Artificial Sequence
  derived and/or modified sequence
MAHRKLESVGSGMLDHRVRPGPVPHSQEPESEDMELPLEGYVPEGLELAALRPESPAPEEQECHNHSPDGDSSSDYVNNTSEEEDYDEGLPEEEEGITYYIRYCPEDDSYLEGMDCNGEEYLAHSAHPVDTDECQEAVEEWTDSAGPHPHGHEAEGSQDYPDGQLPIPEDEPSVLEAHDQEEDGHYCASKEGYQDYYPEEANGNTGASPYRLRRGDGDLEDQEEDIDQIVAEIKMSLSMTSITSASEASPEHGPEPGPEDSVEACPPIKASCSPSRHEARPKSLNLLPEAKHPGDPQRGFKPKTRTPEERLKWPHEQVCNGLEQPRKQQRSDLNGPVDNNNIPETKKVASFPSFVAVPGPCEPEDLIDGIIFAANYLGSTQLLSERNPSKNIRMMQAQEAVSRVKRMQKAAKIKKKANSEGDAQTLTEVDLFISTQRIKVLNADTQETMMDHALRTISYIADIGNIVVLMARRRMPRSASQDCIETTPGAQEGKKQYKMICHVFESEDAQLIAQSIGQAFSVAYQEFLRANGINPEDLSQKEYSDIINTQEMYNDDLIHFSNSENCKELQLEKHKGEILGVVVVESGWGSILPTVILANMMNGGPAARSGKLSIGDQIMSINGTSLVGLPLATCQGIIKGLKNQTQVKLNIVSCPPVTTVLIKRPDLKYQLGFSVQNGIICSLMRGGIAERGGVRVGHRIIEINGQSVVATAHEKIVQALSNSVGEIHMKTMPAAMFRLLTGQETPLYI

SEQ ID NO: 344615 - protein, 264 aa, Artificial Sequence
  derived and/or modified sequence
MAHRKLESVGSGMLDHRVRPGPVPHSQEPESEDMELPLEGYVPEGLELAALRPESPAPEEQECHNHSPDGDSSSDYVNNTSEEEDYDEGLPEEEEGITYYIRYCPEDDSYLEGMDCNGEEYLAHSAHPVDTDECQEAVEEWTDSAGPHPHGHEAEGSQDYPDGQLPIPEDEPSVLEAHDQEEDGHYCASKEGYQDYYPEEANGNTGASPYRLRRGDGDLEDQEEDIDQIVAEIKMSLSMTSITSASEASPEHGPEPGPEDSVEA

SEQ ID NO: 344616 - protein, 112 aa, Artificial Sequence
  derived and/or modified sequence
MAHRKLESVGSGMLDHRVRPGPVPHSQEPESEDMELPLEGYVPEGLELAALRPESPAPEEQECHNHSPDGDSSSDYVNNTSEEEDYDEGLPEEEEGITYYIRYCPEDDSYLE

SEQ ID NO: 344617 - DNA, 84 bp, Artificial Sequence
  derived and/or modified sequence
atggcccaccgcaaactcgaatcagtcggtagcgggatgctcgatcatcgagtgcgccccgggcctgtgccgcacagccaatag

SEQ ID NO: 344618 - DNA, 2250 bp, Artificial Sequence
  derived and/or modified sequence
atggctcaccggaaacttgaatctgtgggttcagggatgctagatcaccgagtccgccccgggcctgtgccccacagtcaggaaccggagtctgaagacatggaactgccactcgagggatatgtgcctgagggattagagcttgccgctctgagaccagaatctccggctcccgaagagcaagaatgccataaccacagtccggacggggactcttcgtctgattacgtcaacaacacgtccgaggaggaggactatgatgaagggctgccggaggaggaggaaggaattacgtactacatcagatattgccccgaggatgactcttatcttgagggcatggattgtaatggggaagagtacttggcgcatagtgcccaccccgtagacacagacgaatgccaggaggccgtcgaagagtggactgattccgcagggccccacccccacggccacgaagccgagggatcccaggattaccctgacggacagctacccattcctgaggacgagcccagtgtgctggaggcccatgatcaggaggaagatggacattattgtgcatctaaggagggttatcaggattattatcctgaagaagccaacggtaatactggggccagtccttaccgcctacgacgaggggacggtgatctcgaggaccaggaagaagacatcgaccaaatcgtggcagagataaagatgagcctgagtatgacatccattacctcagcatcagaagccagtcccgaacatggccctgagcctggtcccgaggatagcgtggaagcctgtcctccaattaaggccagctgttcaccgtcacgccatgaagcccgccccaagagtctgaacttgctaccggaggctaagcacccaggggacccccagaggggcttcaaaccaaagacccggacacccgaggaacggcttaagtggccacacgaacaggtgtgtaatggtctggagcagccacggaagcaacagcggagcgatttaaatggcccagtggataataacaatatcccggagaccaaaaaggtcgctagctttccttcatttgtcgcagttcctggaccctgtgaacccgaagatctaatagatggtatcatctttgccgccaactacttagggtctacccagcttctgagtgagcgaaacccttctaagaatattagaatgatgcaagcgcaggaagctgtttctagggtgaaacggatgcagaaagctgctaagatcaagaagaaggccaacagtgaaggtgatgcacaaaccctcaccgaagtagatctcttcatctctacccaacggatcaaggtgctgaatgctgacacacaagaaactatgatggaccacgccctgagaaccatatcctacatcgctgatattggcaacatcgtagttcttatggctaggagaagaatgcctcggtctgcttcacaggactgcatcgagacaacacctggggcacaggaagggaaaaaacagtataagatgatctgccatgtcttcgagagcgaggatgcccagctgatcgctcaatctattgggcaagctttttctgtggcctatcaggagttcctacgcgcaaatgggattaacccagaggatctctcccagaaagaatactctgacattatcaatactcaggaaatgtacaacgacgatctgatccacttctcaaactctgaaaactgcaaagaactgcagctagagaaacacaaaggggaaatcctgggggttgtggtcgtggaaagcggctggggtagtattctgcccaccgtgattctcgcaaacatgatgaatggcggccccgcagccaggtccggcaagctcagtatcggcgatcagatcatgagcatcaacggcacttccttggttggacttcccttggcgacctgccaaggcatcatcaagggtctgaagaaccagacccaagtgaagttaaacatcgtttcctgcccacctgttactactgtcttaatcaagcggccagacctgaagtaccaactggggttctccgttcagaacggcatcatctgttccctgatgcggggaggtattgcagaacgaggcggtgtgcgggtggggcaccgcattatcgagataaatgggcagtccgtggttgcaactgcacacgaaaaaattgtgcaggccctctcgaactccgtgggcgaaatacacatgaaaaccatgcccgccgctatgttcaggttgctgacgggccaagagacccccctgtatatctag

SEQ ID NO: 344619 - DNA, 2250 bp, Artificial Sequence
  derived and/or modified sequence
atggctcaccgcaaactcgaatcagtcggatctggtatgctcgaccaccgcgtgcggccaggcccagtcccacattcacaagaaccagaatccgaggatatggagctcccgctcgaagggtatgtgccggaggggttagaacttgcagcgctacgccctgagtcgccagcccctgaggaacaagagtgccataatcacagccccgacggcgactcctccagcgactacgtgaataacaccagcgaggaggaagactacgatgagggacttccagaggaggaggagggcatcacctactacatacgctactgccccgaggacgatagttacctggaaggaatggactgcaacggagaggaatatctggcccactctgcccaccctgttgacaccgacgaatgtcaggaagctgtggaagagtggacagactcagccggtccacatccccacgggcacgaagcggagggcagccaggattatccagatggtcagcttcctattccagaagacgaaccatccgtcctcgaagcccatgatcaggaagaagacgggcattactgcgcctctaaagaaggttatcaggactattaccccgaagaagcaaacggtaatacgggcgcctcaccatataggctgcggagaggcgacggggatctggaagatcaagaggaagatatcgatcaaatcgtggcggaaatcaagatgtctctgtccatgactagtattaccagcgcctcagaggccagccccgagcatgggccagaacctggaccagaagatagtgtggaggcatgtcccccgatcaaagctagctgctctcccagtagacatgaggcccgccccaagtccctgaatctcctgcccgaagccaagcatccaggcgacccgcagcgcggttttaagcctaaaacaagaacccctgaagagcgcctcaaatggcctcacgagcaggtgtgtaatggactggaacagcctcgcaagcagcagcgctccgatctgaacggacctgtagacaataacaacattcccgaaacaaaaaaagtggcctctttcccaagcttcgtggctgtacccggtccttgtgaacccgaggatctaatagatggaatcattttcgccgccaactatctcggctccactcaattactgtcagaacgaaatccgtctaaaaacatccgcatgatgcaggctcaggaggcagtgagccgggtgaagagaatgcaaaaggctgctaaaatcaagaagaaggcaaattctgaaggagacgcccagacactgaccgaagtggacttatttatctccacacagaggatcaaggtcctgaatgctgatacacaggagacaatgatggaccacgcactgcgcaccatctcatacatcgctgatatcggcaacatcgttgtactgatggcaagaaggagaatgcctaggagtgcatcacaagactgtatcgaaacaacacccggggctcaagaggggaagaagcagtacaagatgatatgccatgtttttgaaagcgaagacgcacaactgatcgcgcagagtattggacaggctttttccgtggcctaccaggagttcttacgtgccaacggcattaacccagaggacctcagtcagaaagaatactctgacatcattaacacacaagaaatgtacaacgatgacctcatccatttttccaactctgaaaattgtaaggagcttcaactggagaaacacaagggcgaaatcctcggcgtggtagtggtggagtccggctggggatctatccttcccaccgttattttagctaacatgatgaacggtgggccagcagccagatccggtaagttgtcgattggcgaccagattatgagcattaatgggaccagcctggtgggcctccctttagctacatgccagggaattatcaaaggactgaagaatcagacccaggttaaattgaacattgtgtcatgtcctcctgtaaccactgtgttgattaagaggcccgatctaaagtatcagttaggtttttccgtccagaatgggattatctgctccctgatgagggggggcattgctgagcggggaggcgtgcgagtgggtcaccgcatcatcgagattaacggacagtcggtagtcgccaccgctcacgaaaagatcgtgcaggctttgagtaattccgtgggggaaatccacatgaagacaatgcctgctgccatgttccgactactgactggacaggagacccctctgtatatttag

SEQ ID NO: 344620 - DNA, 2250 bp, Artificial Sequence
  derived and/or modified sequence
atggctcaccggaaactcgaatccgtgggatcaggtatgctagaccaccgtgtgcgccctggccctgtcccccattctcaagaacccgaaagtgaggatatggaactgcccttagaaggatatgtgcccgagggcttggagctggccgctctgcgaccggagtcaccagctcctgaagagcaggaatgtcacaaccacagcccagatggggattctagcagtgactacgtaaacaataccagcgaagaagaggactacgacgagggcctgcctgaagaggaggaaggcatcacctactatatcaggtattgcccagaagatgatagctatctcgaaggaatggattgcaacggagaagagtatctggcgcactctgcccaccccgtagacacagatgaatgccaagaggcagtagaagaatggaccgactccgctggcccccatccacacggacacgaagctgaaggcagccaggactaccccgatggacagctcccaatccctgaggacgagcctagtgtgctggaggcccacgatcaggaagaagacggtcactactgtgccagcaaggaaggttatcaggactattatcccgaagaggctaacggaaacaccggggcatccccttataggctccgacgcggcgacggagacttggaagatcaggaagaggacattgatcagattgtggcagagattaaaatgtccctgtcaatgacatctatcacctctgccagcgaggcttcaccagagcacgggcctgaaccaggacccgaggattccgtggaggcatgtccaccaattaaagcctcatgttcccctagcagacatgaggcccggcctaagtccctcaatctgttacctgaggccaaacacccgggagacccccagcgcggattcaagcctaaaacacgtactcctgaggagcggcttaagtggcctcacgaacaggtgtgcaatgggttggaacagccacggaagcagcaaaggtcggaccttaacggacccgttgacaataacaatattccagagaccaagaaagtcgcatcctttccctctttcgtagcggtccctgggccgtgcgaacccgaggacctgattgatggtataatctttgctgctaactacctcggcagcacccagctgctgagcgaaagaaatccttccaagaacattcgcatgatgcaggcccaggaggcggtttcgagggttaaacgaatgcagaaggcagctaaaattaaaaagaaagcgaattctgagggggatgctcaaactttaacagaggttgacctgtttatttcaacccagcggatcaaagtgctaaatgccgatacgcaggagaccatgatggaccatgctctacgcacaatttcttacattgcagatattggaaatattgttgttctcatggctaggagaaggatgccccggtcagcaagccaggattgcatcgaaacaacgccaggagcccaggagggcaaaaaacagtataagatgatttgtcacgtgttcgagtccgaagacgcccagttaattgcacaaagcattgggcaagcgtttagcgtcgcctaccaggagtttctgagggctaacgggattaacccagaggacctgagccagaaagaatactcagacatcatcaatacccaagagatgtacaatgatgacctcattcatttctcaaactccgaaaactgcaaggagttgcagctcgagaagcataaaggggagatactcggggtggtggtcgtagagagtggctgggggagcattttgcctacagttatcctggctaacatgatgaacggggggcctgcggcccgcagtgggaagttaagtattggggaccaaatcatgtctatcaatggtacgagtttggtggggctgcctctggccacgtgccaggggattattaaagggcttaaaaaccagactcaggtcaaattgaatatagttagctgtcccccagtgaccactgtgctgatcaagcgacccgacttaaagtaccagctcggctttagcgttcaaaatggcataatttgctctctgatgaggggcggcatagccgaaagaggcggtgtccgagttggacatagaattattgagatcaatggccagtcagtggttgctaccgcccatgagaagatagtccaggctctcagtaacagcgtgggagaaatccacatgaagactatgccagctgctatgtttaggctgctgactggccaggagacacctttatacatatag

SEQ ID NO: 344621 - DNA, 2259 bp, Artificial Sequence
  derived and/or modified sequence
acaactgctatggcacataggaagctcgagtccgtgggctccggaatgctagatcacagagttcgccccgggcccgtaccacacagtcaagagcccgaatctgaagatatggagctgcctctggaaggatatgtcccagaggggttagagctcgccgccctccgacctgaaagcccagcacccgaagagcaggagtgccacaaccattctccagacggcgattcctcctcggactatgtgaataatacaagtgaggaggaggactatgacgaggggcttccagaagaagaggagggcataacctattacattcgctactgcccagaggacgattcatatttagagggcatggactgcaacggagaggaatacctagctcatagtgctcacccagtggatacagatgagtgtcaagaagccgtcgaagaatggacagatagcgccggccctcaccctcacggccacgaagcggagggcagccaggactatcctgatggacagttacctatccccgaggatgagccctccgtgctcgaggcccatgaccaggaggaggatggccattactgtgcttcaaaggaagggtatcaagactactatccagaggaagctaatggaaacactggcgccagcccttaccgtctgcggagaggggacggggatttagaggaccaagaggaagacattgatcaaatcgtggccgaaatcaagatgtctctgtctatgacaagcatcacgagcgcctctgaagccagcccagaacatgggcccgagccaggcccggaggactccgtcgaagcctgcccacctattaaggccagttgctcaccctctaggcacgaggcaagacctaagagcctgaacctgctgcctgaagcgaagcacccaggagaccctcaacgcgggttcaagcccaagacacgcactcccgaggaaaggctcaaatggcctcacgagcaagtctgcaatggccttgagcagccccggaagcaacagaggtccgaccttaatgggcccgttgataacaataacattcctgaaactaaaaaagttgcatcttttccctccttcgtggcagttccgggaccctgcgagcccgaggatctcatagatggaattatatttgcagccaattatctggggtccacccagttacttagcgagcggaacccatccaagaacatccgcatgatgcaggcacaggaggctgtgtctagagtgaagcgaatgcagaaggctgccaaaatcaagaaaaaggctaatagtgaaggagacgctcagaccttgaccgaagttgatctttttatctccacccagcggattaaagtgctgaacgccgacacccaggaaacaatgatggaccacgcactccggactatatcgtacatcgccgacataggcaacatcgtcgtgttgatggctaggcggaggatgccccgaagtgcctctcaggactgtatcgaaaccacacccggagcccaagaaggaaagaaacagtacaagatgatttgtcatgtgtttgaaagcgaggacgctcagctgatcgcccagtcgatcggccaagctttctcggtggcctatcaggagttcctaagagccaacggcattaatcccgaggacctatcccagaaggaatatagtgatattatcaacactcaggaaatgtataacgatgacctgatacacttcagtaacagcgaaaattgcaaggagctgcaactggaaaaacataaaggagagattcttggagtggtggtagtggagtccggctggggatctatcttgcctacagtgatcttggcaaatatgatgaatgggggtcctgctgcccgctccggcaagttatcaatcggtgatcaaataatgtctataaatggaactagcttggtgggactgcctctcgctacttgtcaaggaattatcaagggtttgaagaaccagacccaggtgaagcttaatattgtctcttgcccaccagtgacaacagtcttgataaagagacccgacctgaagtatcaactcgggttttccgtccagaatggcatcatctgttctcttatgcgcggtggcatagccgagcgcgggggagtcagagttgggcatagaattatagagattaacgggcagtccgtagtggccacggctcacgagaagatcgtgcaggccctttcaaactcagttggcgaaattcatatgaaaactatgccagcggcaatgttccgtttgcttaccgggcaagagacccccctgtatatttag

SEQ ID NO: 344622 - DNA, 84 bp, Artificial Sequence
  derived and/or modified sequence
atggcccacaggaagctggagagcgtgggcagcggcatgctggaccaccgggtgcggcccggccctgtgccccacagccagtag

SEQ ID NO: 344623 - DNA, 2250 bp, Artificial Sequence
  derived and/or modified sequence
atggcccacaggaagctggagagcgtgggcagcggcatgctggaccaccgggtgcggcccggccctgtgccccacagccaggagcctgagagcgaggacatggagctgcccctggagggctacgtgcctgagggcctggagctggccgccctgcggcctgagagccctgcccctgaggagcaggagtgccacaaccacagcccagatggagacagcagcagtgactatgtgaacaacaccagcgaggaggaggactatgatgagggcctgcctgaggaggaggagggcatcacctactacatccgctactgcccagaagatgacagctacctggagggcatggactgcaatggagaggagtacctggcccacagcgcccaccctgtggacacagatgagtgccaggaggccgtggaggagtggacagacagcgctggcccccacccccacggccacgaggccgagggcagccaggactacccagatggccagctgcccatcccagaagatgagcccagcgtgctggaggcccatgaccaggaggaggatggccactactgtgccagcaaggagggctaccaggactactacccagaggaggccaacggcaacacaggagccagcccctaccgcctgcggagaggagatggagacctggaggaccaggaggaggacatcgaccagatcgtggccgagatcaagatgagcctgtccatgaccagcatcaccagcgccagcgaggccagccctgagcacggccctgagcccggcccagaagattctgtggaggcctgcccccccatcaaggccagctgcagccccagcagacatgaggcccggcccaagagcctgaacctgctgcctgaggccaagcaccctggggacccccagaggggcttcaagcccaagaccaggaccccagaggagcggctgaagtggccccatgagcaggtgtgcaatggcctggagcagcccaggaagcagcagaggagtgacctgaatggacctgtggacaacaacaacatccctgagaccaagaaggtggccagcttccccagctttgtggccgtgcccggcccctgtgagcctgaggacctgattgatggcatcatctttgctgccaactacctgggcagcacccagctgctgtctgagaggaaccccagcaagaacatccgcatgatgcaggcccaggaggccgtgtcccgggtgaagaggatgcagaaggccgccaagatcaagaagaaggccaacagtgaaggagatgcccagaccctgacagaggtggacctcttcatcagcacccagaggatcaaggtgctgaatgctgacacccaggagaccatgatggaccacgccctgcggaccatctcctacatcgctgacatcggcaacatcgtggtgctgatggcccggcggaggatgcccaggtctgccagccaggactgcatcgagaccacccctggggcccaggagggcaagaagcagtacaagatgatctgccacgtgtttgaaagtgaagatgcccagctgattgcccagagcatcggccaggccttctctgtggcctaccaggagttcctgcgggccaacggcatcaaccctgaggacctgagccagaaggagtacagcgacatcatcaacacccaggagatgtacaatgatgacctgatccacttcagcaacagcgagaactgcaaggagctgcagctggagaagcacaagggggagatcctgggcgtggtggtggtggagagcggctggggcagcatcctgcccaccgtcatcctggccaacatgatgaatggaggccctgctgcccggagcggcaagctgagcatcggggaccagatcatgagcatcaatggcaccagcctggtgggcctgcccctggccacctgccagggcatcatcaagggcctgaagaaccagacccaggtgaagctgaacatcgtgtcctgcccccctgtgaccaccgtgctgatcaagaggccagacctgaagtaccagctgggcttctctgtgcagaatggcatcatctgcagcctgatgaggggcggcattgctgagcggggcggcgtgcgggtgggccaccgcatcatcgagatcaatggccagagcgtggtggccacagcccacgagaagatcgtgcaggccctgagcaacagcgtgggggagatccacatgaagaccatgcctgctgccatgttccggctgctgaccggccaggagacccccctgtacatctag

SEQ ID NO: 344624 - DNA, 2259 bp, Artificial Sequence
  derived and/or modified sequence
accacagccatggcccacaggaagctggagagcgtgggcagcggcatgctggaccaccgggtgcggcccggccctgtgccccacagccaggagcctgagagcgaggacatggagctgcccctggagggctacgtgcctgagggcctggagctggccgccctgcggcctgagagccctgcccctgaggagcaggagtgccacaaccacagcccagatggagacagcagcagtgactatgtgaacaacaccagcgaggaggaggactatgatgagggcctgcctgaggaggaggagggcatcacctactacatccgctactgcccagaagatgacagctacctggagggcatggactgcaatggagaggagtacctggcccacagcgcccaccctgtggacacagatgagtgccaggaggccgtggaggagtggacagattctgctggcccccacccccacggccatgaagctgagggcagccaggactacccagatggccagctgcccatcccagaagatgagcccagcgtgctggaggcccatgaccaggaggaggatggccactactgtgccagcaaggagggctaccaggactactacccagaggaggccaatggaaacacaggagccagcccctaccgcctgcggagaggagatggagacctggaggaccaggaggaggacatcgaccagatcgtggccgagatcaagatgagcctgtccatgaccagcatcaccagcgccagcgaggccagccctgagcacggccctgagcccggccctgaggacagcgtggaggcctgcccccccatcaaggccagctgcagccccagcagacatgaggcccggcccaagagcctgaacctgctgcctgaggccaagcaccctggggacccccagaggggcttcaagcccaagaccaggaccccagaggagcggctgaagtggccccatgagcaggtgtgcaatggcctggagcagcccaggaagcagcagaggagtgacctgaatggacctgtggacaacaacaacatccctgagaccaagaaggtggccagcttccccagctttgtggccgtgcccggcccctgtgagcctgaggacctgattgatggcatcatctttgctgccaactacctgggcagcacccagctgctgtctgaaagaaaccccagcaagaacatccgcatgatgcaggcccaggaggccgtgtcccgggtgaagaggatgcagaaggccgccaagatcaagaagaaggccaacagtgaaggagatgcccagaccctgacagaggtggacctcttcatcagcacccagaggatcaaggtgctgaatgctgacacccaggagaccatgatggaccacgccctgcggaccatctcctacatcgctgacatcggcaacatcgtggtgctgatggcccggcggaggatgcccaggtctgccagccaggactgcatcgagaccacccctggggcccaggagggcaagaagcagtacaagatgatctgccacgtgtttgaaagtgaagatgcccagctgattgcccagagcatcggccaggccttctctgtggcctaccaggagttcctgcgggccaacggcatcaaccctgaggacctgagccagaaggagtacagcgacatcatcaacacccaggagatgtacaatgatgacctgatccacttcagcaacagcgagaactgcaaggagctgcagctggagaagcacaagggggagatcctgggcgtggtggtggtggagagcggctggggcagcatcctgcccaccgtcatcctggccaacatgatgaatggaggccctgctgcccggagcggcaagctgagcattggagaccagatcatgagcatcaatggcaccagcctggtgggcctgcccctggccacctgccagggcatcatcaagggcctgaagaaccagacccaggtgaagctgaacatcgtgtcctgcccccctgtgaccaccgtgctgatcaagaggccagacctgaagtaccagctgggcttctctgtgcagaatggcatcatctgcagcctgatgagaggaggcattgctgagcggggcggcgtgcgggtgggccaccgcatcatcgagatcaatggccagagcgtggtggccacagcccacgagaagatcgtgcaggccctgagcaacagcgtgggggagatccacatgaagaccatgcctgctgccatgttccggctgctgaccggccaggagacccccctgtacatctag

SEQ ID NO: 344625 - DNA, 84 bp, Artificial Sequence
  derived and/or modified sequence
atggcccaccggaagctggagagcgtgggcagcggcatgctggaccacagggtgagacccggtcccgtcccccactctcagtag

SEQ ID NO: 344626 - DNA, 2250 bp, Artificial Sequence
  derived and/or modified sequence
atggcccaccggaagctggagagcgtgggcagcggcatgctggaccaccgcgtccggcccggacccgtcccacattctcaggagccagaatccgaagatatggaacttcctctggagggatacgttcccgaaggcttggagcttgctgcgctccggccagaatcccccgccccagaagagcaggagtgccacaaccactcacctgacggagactctagttcggattatgtgaataatactagtgaggaagaggattacgacgagggactgcctgaagaggaagaaggcatcacctattacatacggtactgtcccgaagatgatagttacctcgaagggatggattgtaacggcgaggagtatcttgctcactccgcccatccagtggatacagatgaatgccaggaagccgtggaggagtggacagattctgctggacctcacccccacggtcacgaagctgaaggcagccaggactacccggatggccagctgccaataccggaggacgaacccagcgtattagaggcccacgaccaagaggaagatggccactattgtgctagcaaagaagggtatcaagactattatcctgaagaggctaacggcaataccggggcatccccctatcgcctgcgccgaggcgacggagacctggaggaccaggaggaagacattgaccagatcgttgcagagattaaaatgtctctgagtatgacaagtattacctcagcgagcgaagcctctccagagcatggcccagaacccggccctgaggacagcgtggaggcctgtccacctattaaagccagctgttccccttctagacacgaggctaggcctaaatccttaaatctgttgcctgaggcaaagcatcccggcgaccctcaacgggggttcaagcccaaaacccgcacacctgaggagcgattaaagtggccgcatgagcaggtttgcaacggactcgagcagccaagaaaacaacaacggtctgatttgaacgggcccgtggataacaataacatacctgaaactaaaaaagttgcctcctttccaagcttcgtggccgtaccagggccctgcgagccagaagacttgattgatggaatcatttttgcagcaaactacctgggctccactcagttgctgtcagaaagaaaccctagtaagaacatccgaatgatgcaggcacaagaagcagtctccagggtaaaaaggatgcagaaagccgcaaaaatcaagaagaaagccaatagcgagggtgatgcacagactttaaccgaggtggatctgtttatcagcactcagcgtataaaagtgcttaatgcggacacacaggaaacaatgatggaccatgcactaaggacgattagctatattgccgatatcggcaatatcgtggttttaatggcgaggcgccgcatgcctcggagcgcctcccaggattgcatcgaaactaccccgggagcgcaggagggcaaaaagcagtacaaaatgatttgtcatgtctttgaaagcgaagatgctcaattaattgcgcagtctataggccaggccttctccgttgcatatcaggaatttctgcgtgctaatgggattaatcccgaggatttgtcccagaaggagtactcagacattattaatacacaggagatgtacaatgacgatctcatccacttctctaattctgagaactgtaaggagttgcagttggagaaacataagggcgagattctaggggtggtggtcgttgagtctgggtgggggtctatcttgcccaccgtcatactagctaacatgatgaacggaggcccggcagccagatccggcaaactgagtatcggggaccagatcatgtccatcaacgggacttccctggtgggcctcccgctggctacgtgtcaaggcatcatcaaaggattaaagaatcaaacccaggtaaaactgaacattgtgagctgccccccagtgaccaccgtcctcattaaacggccagacctgaagtaccaattggggttcagcgtgcagaatggcatcatctgctcgctgatgcgcggaggaattgctgaaagaggtggcgtaagggtgggacacagaattatcgaaattaatgggcagtcagtcgtagcaacagctcacgaaaagatcgtgcaagctctgtccaacagcgtaggggaaattcatatgaagaccatgccagccgccatgttccggctgttgacagggcaggaaactcctctttatatctag

SEQ ID NO: 344627 - DNA, 2250 bp, Artificial Sequence
  derived and/or modified sequence
atggcccaccggaagctggagagcgtgggcagcggcatgctggaccatagggtgagacctggccccgtgccccactcgcaggagcctgagagcgaggacatggagctccccctcgagggctacgtaccagagggcctggagttagccgctctgcgaccagaaagccccgcccctgaggagcaggagtgtcataatcatagcccagacggcgacagctcctcagattacgtcaacaatacaagtgaggaagaggactatgacgaaggtctcccagaagaggaagaagggataacatattacatccggtattgccctgaagacgattcttatttagaagggatggattgcaacggtgaggagtacctcgcccacagtgctcatcccgtcgatacagatgaatgccaagaggcagtggaagagtggaccgacagcgccggaccccatccacacggccatgaggcggagggttctcaggactacccagatggccaactacccatccctgaagacgagccttctgtgttggaagcacacgaccaggaggaggatggccactactgcgcctcgaaagagggctaccaagactactaccccgaagaggccaatggcaataccggggcttctccttacagactcaggcgcggcgacggggatctggaggaccaagaggaggacattgatcaaattgtggcagagatcaagatgtctctctctatgaccagcattacttccgccagtgaagctagccccgagcatggccccgaaccaggacctgaagattccgtggaagcatgtcctcctataaaggcaagctgctccccatcccggcacgaggcccgcccaaagtcgctgaacctgctgcctgaggcaaagcacccgggtgacccacaacggggcttcaagcccaagacacggacacccgaggagaggcttaaatggcctcacgagcaggtgtgtaacgggctggagcagccacggaaacagcaacgctcagatttaaacggccccgttgataataacaacatccctgagaccaaaaaggtggcgtcttttccatcttttgtagccgtgccaggcccgtgcgaacccgaagacctgattgatggcatcattttcgctgccaactatctagggtccactcaacttctctccgagagaaatccctccaaaaacatcagaatgatgcaagcccaggaagcggtgtctcgggtaaaacgtatgcagaaggctgccaaaatcaagaagaaagctaatagcgaaggagacgctcaaacactaactgaagtagatctatttatctcgacgcagaggattaaggttctgaacgcagatacccaggaaactatgatggatcatgccctccggacaatcagctatatcgccgatattggcaacatagttgtgctaatggctcgccgaagaatgcctagaagcgcaagccaggattgcatcgaaaccactcccggtgcccaggagggtaaaaaacagtataaaatgatatgtcacgtcttcgaatcagaggacgcccaactcatcgcgcaatcaatcggccaggctttctcagtagcctatcaggaattcctgcgggcaaacggaattaatcccgaggacctgagccagaaagaatactccgacatcatcaacactcaagagatgtacaatgacgatttgattcatttcagtaattcagaaaactgtaaagagctccagttggaaaaacacaagggagagattctgggcgtggtggtcgttgagagtggttggggttccatcttgcctactgttatcttggccaatatgatgaatgggggtccagcagcacgctctggcaaactgtctatcggcgatcagatcatgtcgattaatgggacctccctggtcgggctgcccctcgcaacatgtcagggaattatcaaagggctgaaaaatcagactcaggtaaagctgaatatcgtctcctgtccacccgtgacgacggtgttgattaaacgcccagaccttaagtaccaattgggcttttcagtccagaacgggattatctgtagtctgatgcggggaggtatcgccgaacgcggtggagtgagggtgggccaccgcatcatagaaattaacggccaaagcgtcgtagcgactgcacacgaaaagatcgtgcaagcactctccaattcagtgggcgagatccacatgaagacaatgcccgccgccatgttccgtctgctcacgggacaggagacacctctgtacatatag

SEQ ID NO: 344628 - DNA, 2250 bp, Artificial Sequence
  derived and/or modified sequence
atggcccaccggaagctggagagcgtgggcagcggcatgctggaccaccgggtccggcctggcccagttccgcacagccaggaaccggaatcagaagatatggagctgccccttgaaggttatgttccagaaggtctcgaactcgccgcactgagacctgaatcgcccgcaccagaagaacaagagtgtcataatcattctcccgacggcgattctagcagcgactacgttaataatacttccgaggaagaagattacgacgagggcctacccgaagaagaggagggcataacatactacattcgctattgccccgaggatgactcttatctcgaggggatggactgcaacggtgaggaatacctcgctcactcggcacaccccgtcgacactgacgagtgtcaggaggctgtggaggagtggactgactccgcgggtcctcatcctcatggtcacgaggccgagggatcccaggactaccccgatggacagctccctattcctgaggacgagcccagtgtcctggaagcccacgaccaggaggaggatggtcattactgtgcgagtaaagagggctatcaggattattatcctgaagaagcaaatggaaacaccggcgccagcccctaccgccttcgcaggggtgacggagacctggaggatcaggaagaagatatcgaccagatagtcgctgagattaaaatgagcttgtccatgactagtattacaagcgcatctgaggcctctcctgaacatggccccgagccaggccccgaggacagcgtggaggcctgcccaccgattaaggctagctgttctccctctcgccacgaagctagacctaaatccctcaacctgctgcccgaggccaagcacccaggggatccacagagaggattcaaacccaagactagaacccccgaggaaagactgaagtggccccacgaacaggtgtgcaacggtctggagcaaccccgcaagcagcagcgttccgatctgaatggtcctgttgataataataacattcccgagaccaagaaagtggctagctttccgtcatttgtagcagtgcctgggccttgtgagcctgaagacctgatcgacggcattattttcgccgcgaactacctgggttccacccagctgctcagcgagaggaaccctagcaagaatatcagaatgatgcaggctcaggaagcagtttctagagtgaagcgcatgcagaaggcagctaaaatcaaaaaaaaagctaattctgagggggatgcgcaaacactgaccgaagtggacttgttcatctccacccagcgaataaaagtgttgaacgccgatacacaggagacgatgatggatcatgcactgcgaacgatatcttacatagcggatattgggaacatcgtcgtcctgatggcccgacgtaggatgcctcgttcagcgagccaggattgcattgaaacgacccccggtgctcaggagggaaagaagcagtataaaatgatctgccacgtgttcgagtcggaagacgctcagctaatcgcccaatcaataggacaagccttttcagttgcctatcaagagttcctacgggccaatgggataaacccagaggacctgtcacagaaggagtacagtgacattatcaacacccaggagatgtataacgatgatttaatacacttttctaactctgagaactgcaaagaactgcagctggagaagcataagggagagattctgggtgtcgtggtcgtggagtctggatgggggagcatcctgcccactgtcatcctcgctaacatgatgaacggtggacctgcagccaggtccggcaagctgtccattggagaccagataatgagtatcaatggaaccagcctggtgggcttacccctggccacatgccagggtatcatcaaaggcctgaagaaccagactcaagtgaagctcaatatcgtaagttgcccacctgtcacaacggtgctgataaagcgtcccgatcttaaataccagcttggattttcagttcagaacgggatcatctgttctttgatgcggggtgggatcgccgagaggggcggcgtccgggtcggccatcgaattatagaaatcaatggccagtcagtagtagcgactgcccacgaaaagattgtgcaggctctaagcaattccgtgggtgagatccatatgaaaactatgccagcggcaatgttccgcctactgaccggacaagagaccccactctatatctag

SEQ ID NO: 344629 - DNA, 3635 bp, Artificial Sequence
  derived and/or modified sequence
cagtctcctgaatatttacgcgttgctgaatctcctgtggacaaaccaccaataggccaggactgtcctgtggacagacggggtgagcctcttcttgtgtctggagattctgaaaagatttgatcaccaggagatttttcgggacattaccaaaccactcattttagtggctgcctccgggtgatgatggctgtgtgaacgactgccatggcccaccggaagcttgagagcgtggggagcggcatgttggaccatagggtgagaccaggtcctgtccctcacagccaggagcccgagagcgaggacatggagctgcccttggagggctatgtgcccgagggcctggagctggctgccctgcggccagagagccccgcgccagaggaacaggagtgccacaaccacagccccgatggggactccagctctgactacgtgaacaacacctctgaggaggaggactatgacgagggcctccctgaggaggaggagggcatcacctactacatccgctactgccctgaggacgacagctacctagagggcatggactgcaacggggaggagtacctggcccacagtgcacaccctgtggacactgatgagtgccaggaggcggtggaggagtggacggactcggcgggcccgcacccccacggccacgaggctgaaggcagccaggactacccagacggccaactgcccattccggaggatgagccctccgtccttgaggcccatgaccaggaagaagatggtcactactgtgccagcaaagagggctaccaggactactaccccgaggaggccaacgggaacaccggcgcctccccctaccgcctgaggcgtggggatggggacctggaggaccaggaggaggacattgaccagatcgtggcagagatcaagatgagtctgagcatgaccagcatcaccagcgccagtgaggccagccccgagcatgggcctgagccagggcctgaggactctgtagaggcctgcccacccatcaaggccagctgcagccccagcaggcacgaggcgaggcccaagtcgctgaacctccttcccgaggccaagcaccccggagacccccagagaggcttcaagcccaagaccaggaccccagaagagaggctgaagtggccccacgagcaggtttgcaatggtctggagcagccaaggaagcagcagcgctctgatctcaatggacctgttgacaataacaacattccagagacaaagaaggtggcatcatttccaagttttgtggctgttccagggccctgcgaaccagaagacctcatcgacgggatcatctttgctgccaattacctggggtccacccagctgctatcagaacggaacccttccaaaaacatcagaatgatgcaagcgcaggaggccgtcagccgggtcaagaggatgcaaaaggctgctaagatcaagaaaaaagcgaattctgagggggatgcccagacgctgacggaagtggacctcttcatttccacccagaggatcaaggttttaaatgcagacacgcaggaaaccatgatggaccacgccttgcgtaccatctcctacatcgccgacattgggaacattgtagtgctgatggccagacgccgcatgccccggtcagcctctcaggactgcatcgagaccacgcccggggcccaggaaggcaagaagcagtataagatgatctgccatgtgttcgagtcggaggatgcccagctcatcgcccagtctatcggccaggccttcagcgtggcctaccaggagttcctgcgagccaatggcatcaaccccgaagacttgagccagaaggaatacagcgacatcatcaacacccaggagatgtacaacgacgacctcatccacttctcaaactcggagaactgcaaggagctgcagctggagaagcacaagggcgagatcctgggcgtggtggtggtggagtcgggctggggctccatcctgcccacggtgatcctggccaacatgatgaatggcggcccggctgcccgctcggggaagctgagcatcggggaccagatcatgtccatcaatggcaccagcctggtggggctgcccctcgccacctgccaaggcatcatcaagggcctgaagaaccagacacaggtgaagctcaacattgtcagctgtcccccggtcaccacggtccttatcaagcggccagacctcaagtaccagctgggcttcagcgtgcagaatggaattatctgcagcctcatgagagggggcattgctgagcgagggggcgtccgtgtgggccaccgcatcatcgagatcaacgggcagagcgtggtggccacagcccacgagaagatagtccaagctctgtccaactcggtcggagagatccacatgaagaccatgcccgccgccatgttcaggctcctcacgggtcaggagaccccgctgtacatctaggccaccccagcctggccacgcagccaggacaccgggcagggccgcccgggcccagaggagctgggagccgggccgcagacttgaccccgacgccacagcccagccacggacgctggctccccaaagggtgtgccctcaccacccacttgatttttttcattttgccaaaaaggggtatgtctttatcaaaggagagtcacagaacaaatgtttgtttgtaaagcgttccaagtattttgccacgttctggactgtcttctccctgcacaagccagggtgtgtctcggtagctgtgcgtggtgtggagtgtgtgtctttcctccctgaagctgtgcggagcgaactggcgcctccgagggacgcggctcccggggcagggcagccgtcacccctgcctcccgcccccttggctgggacgtctggggtcctgtggggcccccacaatggtcccaaacagctgcctctgccactgactgcagggacacgggcagcctggctcccaggacacgacttgtaatgaaagtttggggacatgtgattgattgattgattgtaaataaaggatgatggccacaacatgaaaactccatatttatttagatgctattattactgtttggacttttattttggcaggcttttttccagactctagggttttccaatgtgactaatgaccacacctgcctctcccgtcgtctcttctgggcaccctcccacccggctgcatacccgggcagggctcccacagagacaaggagggcacaggtgtctgccccctctttaaaatcgatctacacacatccacgcacatgcgaccccgaggaaacgaaacccactctagaaaacgcgaccttggccgcacctaaagcagccagccgtgagtgcagaccccttggccagcgtggcgcagtggccctgagcagtagtggcatgtgtgtagatcaagtcggatctagtccagctcggttcattagcgatccatgtaatctgacgtcatcttgtctcgaagtctctttttttggcccaggccttgaagaatacactgtgacttaagaagccttaccacgcagtaactaaagctttaggatgactgtattcgaggagtgccgtgtgttgcatgcagctacccgtaggaagacttcgcgcatatcactaataaacctgaagtcgtgatg

SEQ ID NO: 344630 - DNA, 4031 bp, Artificial Sequence
  derived and/or modified sequence
agtgtgcccggcgcgggtgaggcggaagcggccggggcgggggcgcaggcccggcagccgcaggccggtgcgggatgcgccccgcagccgcgccgcgtgcgcccggcagaggcggccctgcgtgccgtacgctgcgtccggggcgcgcccgccgctattcgggaagctattcagcttcccgggctcattagcagtcgcggtgtgcggctcggcgcgggctcacaaagagctcggcctcgcggactgagccggcggcagcggggcggggacggcggcgtacccgggcagcccagcgccctggccaggcggagggagctgttcatcctctgggggctgctgggccagaaatatctcttacctgataatgtcaggcatcagaggttcctgtttcgtggtctcctgaatatttacgcgttgctgaatctcctgtggacaaaccaccaataggccaggactgtcctgtggacagacggggtgagcctcttcttgtgtctggagattctgaaaagatttgatcaccaggagatttttcgggacattaccaaaccactcattttagtggctgcctccgggtgatgatggctgtgtgaacgactgccatggcccaccggaagcttgagagcgtggggagcggcatgttggaccatagggtgagaccaggtcctgtccctcacagccaggagcccgagagcgaggacatggagctgcccttggagggctatgtgcccgagggcctggagctggctgccctgcggccagagagccccgcgccagaggaacaggagtgccacaaccacagccccgatggggactccagctctgactacgtgaacaacacctctgaggaggaggactatgacgagggcctccctgaggaggaggagggcatcacctactacatccgctactgccctgaggacgacagctacctagagggcatggactgcaacggggaggagtacctggcccacagtgcacaccctgtggacactgatgagtgccaggaggcggtggaggagtggacggactcggcgggcccgcacccccacggccacgaggctgaaggcagccaggactacccagacggccaactgcccattccggaggatgagccctccgtccttgaggcccatgaccaggaagaagatggtcactactgtgccagcaaagagggctaccaggactactaccccgaggaggccaacgggaacaccggcgcctccccctaccgcctgaggcgtggggatggggacctggaggaccaggaggaggacattgaccagatcgtggcagagatcaagatgagtctgagcatgaccagcatcaccagcgccagtgaggccagccccgagcatgggcctgagccagggcctgaggactctgtagaggcctgcccacccatcaaggccagctgcagccccagcaggcacgaggcgaggcccaagtcgctgaacctccttcccgaggccaagcaccccggagacccccagagaggcttcaagcccaagaccaggaccccagaagagaggctgaagtggccccacgagcaggtttgcaatggtctggagcagccaaggaagcagcagcgctctgatctcaatggacctgttgacaataacaacattccagagacaaagaaggtggcatcatttccaagttttgtggctgttccagggccctgcgaaccagaagacctcatcgacgggatcatctttgctgccaattacctggggtccacccagctgctatcagaacggaacccttccaaaaacatcagaatgatgcaagcgcaggaggccgtcagccgggtcaagaggatgcaaaaggctgctaagatcaagaaaaaagcgaattctgagggggatgcccagacgctgacggaagtggacctcttcatttccacccagaggatcaaggttttaaatgcagacacgcaggaaaccatgatggaccacgccttgcgtaccatctcctacatcgccgacattgggaacattgtagtgctgatggccagacgccgcatgccccggtcagcctctcaggactgcatcgagaccacgcccggggcccaggaaggcaagaagcagtataagatgatctgccatgtgttcgagtcggaggatgcccagctcatcgcccagtctatcggccaggccttcagcgtggcctaccaggagttcctgcgagccaatggcatcaaccccgaagacttgagccagaaggaatacagcgacatcatcaacacccaggagatgtacaacgacgacctcatccacttctcaaactcggagaactgcaaggagctgcagctggagaagcacaagggcgagatcctgggcgtggtggtggtggagtcgggctggggctccatcctgcccacggtgatcctggccaacatgatgaatggcggcccggctgcccgctcggggaagctgagcatcggggaccagatcatgtccatcaatggcaccagcctggtggggctgcccctcgccacctgccaaggcatcatcaagggcctgaagaaccagacacaggtgaagctcaacattgtcagctgtcccccggtcaccacggtccttatcaagcggccagacctcaagtaccagctgggcttcagcgtgcagaatggaattatctgcagcctcatgagagggggcattgctgagcgagggggcgtccgtgtgggccaccgcatcatcgagatcaacgggcagagcgtggtggccacagcccacgagaagatagtccaagctctgtccaactcggtcggagagatccacatgaagaccatgcccgccgccatgttcaggctcctcacgggtcaggagaccccgctgtacatctaggccaccccagcctggccacgcagccaggacaccgggcagggccgcccgggcccagaggagctgggagccgggccgcagacttgaccccgacgccacagcccagccacggacgctggctccccaaagggtgtgccctcaccacccacttgatttttttcattttgccaaaaaggggtatgtctttatcaaaggagagtcacagaacaaatgtttgtttgtaaagcgttccaagtattttgccacgttctggactgtcttctccctgcacaagccagggtgtgtctcggtagctgtgcgtggtgtggagtgtgtgtctttcctccctgaagctgtgcggagcgaactggcgcctccgagggacgcggctcccggggcagggcagccgtcacccctgcctcccgcccccttggctgggacgtctggggtcctgtggggcccccacaatggtcccaaacagctgcctctgccactgactgcagggacacgggcagcctggctcccaggacacgacttgtaatgaaagtttggggacatgtgattgattgattgattgtaaataaaggatgatggccacaacatgaaaactccatatttatttagatgctattattactgtttggacttttattttggcaggcttttttccagactctagggttttccaatgtgactaatgaccacacctgcctctcccgtcgtctcttctgggcaccctcccacccggctgcatacccgggcagggctcccacagagacaaggagggcacaggtgtctgccccctctttaaaatcgatctacacacatccacgcacatgcgaccccgaggaaacgaaacccactctagaaaacgcgaccttggccgcacctaaagcagccagccgtgagtgcagaccccttggccagcgtggcgcagtggccctgagcagtagtggcatgtgtgtagatcaagtcggatctagtccagctcggttcattagcgatccatgtaatctgacgtcatcttgtctcgaagtctctttttttggcccaggccttgaagaatacactgtgacttaagaagccttaccacgcagtaactaaagctttaggatgactgtattcgaggagtgccgtgtgttgcatgcagctacccgtaggaagacttcgcgcatatcactaataaacctgaagtcgtgatgaaaa

SEQ ID NO: 344631 - DNA, 3138 bp, Artificial Sequence
  derived and/or modified sequence
acataacagtaaggcaagaagatgactgcatttatcttctcagaatcacttcttcttaattgttgcttcccactattggcattggtgaaaggctgggccacaggaggctggatgaactttgtgttagccagtctcctgaatatttacgcgttgctgaatctcctgtggacaaaccaccaataggccaggactgtcctgtggacagacgggaaagatttgatcaccaggagatttttcgggacattaccaaaccactcattttagtggctgcctccgggtgatgatggctgtgtgaacgactgccatggcccaccggaagcttgagagcgtggggagcggcatgttggaccatagggtgagaccaggtcctgtccctcacagccaggagcccgagagcgaggacatggagctgcccttggagggctatgtgcccgagggcctggagctggctgccctgcggccagagagccccgcgccagaggaacaggagtgccacaaccacagccccgatggggactccagctctgactacgtgaacaacacctctgaggaggaggactatgacgagggcctccctgaggaggaggagggcatcacctactacatccgctactgccctgaggacgacagctacctagagggcatggactgcaacggggaggagtacctggcccacagtgcacaccctgtggacactgatgagtgccaggaggcggtggaggagtggacggactcggcgggcccgcacccccacggccacgaggctgaaggcagccaggactacccagacggccaactgcccattccggaggatgagccctccgtccttgaggcccatgaccaggaagaagatggtcactactgtgccagcaaagagggctaccaggactactaccccgaggaggccaacgggaacaccggcgcctccccctaccgcctgaggcgtggggatggggacctggaggaccaggaggaggacattgaccagatcgtggcagagatcaagatgagtctgagcatgaccagcatcaccagcgccagtgaggccagccccgagcatgggcctgagccagggcctgaggactctgtagaggcctgcccacccatcaaggccagctgcagccccagcaggcacgaggcgaggcccaagtcgctgaacctccttcccgaggccaagcaccccggagacccccagagaggcttcaagcccaagaccaggaccccagaagagaggctgaagtggccccacgagcaggtttgcaatggtctggagcagccaaggaagcagcagcgctctgatctcaatggacctgttgacaataacaacattccagagacaaagaaggtggcatcatttccaagttttgtggctgttccagggccctgcgaaccagaagacctcatcgacgggatcatctttgctgccaattacctggggtccacccagctgctatcagaacggaacccttccaaaaacatcagaatgatgcaagcgcaggaggccgtcagccgggtcaagaggatgcaaaaggctgctaagatcaagaaaaaagcgaattctgagggggatgcccagacgctgacggaagtggacctcttcatttccacccagaggatcaaggttttaaatgcagacacgcaggaaaccatgatggaccacgccttgcgtaccatctcctacatcgccgacattgggaacattgtagtgctgatggccagacgccgcatgccccggtcagcctctcaggactgcatcgagaccacgcccggggcccaggaaggcaagaagcagtataagatgatctgccatgtgttcgagtcggaggatgcccagctcatcgcccagtctatcggccaggccttcagcgtggcctaccaggagttcctgcgagccaatggcatcaaccccgaagacttgagccagaaggaatacagcgacatcatcaacacccaggagatgtacaacgacgacctcatccacttctcaaactcggagaactgcaaggagctgcagctggagaagcacaagggcgagatcctgggcgtggtggtggtggagtcgggctggggctccatcctgcccacggtgatcctggccaacatgatgaatggcggcccggctgcccgctcggggaagctgagcatcggggaccagatcatgtccatcaatggcaccagcctggtggggctgcccctcgccacctgccaaggcatcatcaagggcctgaagaaccagacacaggtgaagctcaacattgtcagctgtcccccggtcaccacggtccttatcaagcggccagacctcaagtaccagctgggcttcagcgtgcagaatggaattatctgcagcctcatgagagggggcattgctgagcgagggggcgtccgtgtgggccaccgcatcatcgagatcaacgggcagagcgtggtggccacagcccacgagaagatagtccaagctctgtccaactcggtcggagagatccacatgaagaccatgcccgccgccatgttcaggctcctcacgggtcaggagaccccgctgtacatctaggccaccccagcctggccacgcagccaggacaccgggcagggccgcccgggcccagaggagctgggagccgggccgcagacttgaccccgacgccacagcccagccacggacgctggctccccaaagggtgtgccctcaccacccacttgatttttttcattttgccaaaaaggggtatgtctttatcaaaggagagtcacagaacaaatgtttgtttgtaaagcgttccaagtattttgccacgttctggactgtcttctccctgcacaagccagggtgtgtctcggtagctgtgcgtggtgtggagtgtgtgtctttcctccctgaagctgtgcggagcgaactggcgcctccgagggacgcggctcccggggcagggcagccgtcacccctgcctcccgcccccttggctgggacgtctggggtcctgtggggcccccacaatggtcccaaacagctgcctctgccactgactgcagggacacgggcagcctggctcccaggacacgacttgtaatgaaagtttggggacatgtgattgattgattgattgtaaataaaggatgatggccacaacatgaaaa

SEQ ID NO: 344632 - DNA, 2259 bp, Artificial Sequence
  derived and/or modified sequence
accaccgccatggcccaccggaagctggagagcgtgggcagcggcatgctcgaccatagagtccgcccgggccctgtgccgcattctcaagaaccagaaagcgaggatatggaactccccttagaaggctacgttcccgaggggctggagctggccgcactccggccagagtcgccggccccggaggaacaggagtgccacaaccacagtccggacggtgactcttcgtccgactatgtgaataacaccagcgaggaggaggattatgatgagggacttcctgaagaggaggagggcatcacatactacataagatactgtccagaggacgacagctatctagagggaatggattgtaatggtgaggagtatctcgctcattcagcccatcctgtcgatactgacgaatgccaagaggcagtcgaggaatggaccgatagcgctgggccgcaccctcacggccacgaggccgagggctcccaggattacccagatggccagctcccgataccggaggatgaaccctccgtgctcgaggcgcatgaccaggaggaggacggtcactattgtgctagcaaggagggataccaggactactatcccgaggaagccaatggtaacaccggcgcttccccttatcgcctgcgccgaggtgacggcgatctagaagatcaggaggaggacatagatcaaatagtcgctgagattaaaatgagtctttccatgaccagcatcacatctgcaagcgaagcttctcctgaacatggaccagaaccaggcccagaagatagcgtggaagcttgtcctcctattaaggcatcctgctctccttcaagacatgaggcacgaccaaagtcactcaacttgctgcccgaggcaaaacaccccggcgacccacagagaggctttaaacctaagacacggaccccagaagagcgattgaagtggcctcacgagcaagtctgcaatggcctggaacagccccgaaagcagcagagatcagacttaaatggccccgtggataataataatatccctgagacaaaaaaagtcgcgtccttcccaagttttgtagcagtgccaggaccctgtgagccggaagatctgattgacggtatcatttttgctgccaactacctcggatccactcagcttctcagcgagaggaaccctagcaagaacataaggatgatgcaggcacaggaggccgtgtcacgagtaaagagaatgcagaaagcggccaagatcaaaaaaaaagctaattcagaaggagacgcacagaccctcaccgaagtcgatctgttcatcagcacacagagaatcaaagtgctaaatgctgacacgcaggaaacgatgatggaccatgccctgaggacaatttcctacatagctgatattggcaatattgtcgtgctgatggctagacggagaatgcctcgaagcgcctcacaagattgcatcgaaaccactccgggagcccaggagggcaagaaacagtacaaaatgatctgtcatgtgtttgagagcgaggacgcccagcttattgctcagagcattgggcaggcatttagtgtggcgtaccaagagtttctcagggcgaacggtatcaaccctgaggatctgagtcaaaaagagtattctgacattattaatactcaagaaatgtataatgacgacctcatacatttctcaaactcggagaactgcaaagaactgcagctggaaaagcacaagggcgagatcctgggcgtcgtggtcgtcgagtcaggatggggcagcatactgcctaccgtcatcctggccaatatgatgaacggagggcccgcagcccggtctggaaaactcagcatcggtgatcagattatgagtatcaacggcacctctttggtgggtttgccgctagctacatgccagggaattatcaaggggctgaaaaaccagacccaggtcaagctgaacatcgtttcttgtccgcccgtcactactgtgcttatcaaaagaccagacctcaagtaccagctggggttctccgtgcagaacgggattatctgtagccttatgcggggaggaatcgcagaacgggggggagttcgtgtgggacaccggattattgaaatcaacggacaatcagtagtggcaactgctcacgagaagatcgtccaggcactatctaattcggtgggcgaaattcatatgaagactatgcccgccgcaatgttcaggctattgaccgggcaggaaacacccttgtacatttag

SEQ ID NO: 344633 - DNA, 84 bp, Artificial Sequence
  derived and/or modified sequence
atggcacatcgtaaactggagagtgttggaagtggaatgctcgatcaccgagttcgacctggccctgttccacacagccaatag

SEQ ID NO: 344634 - DNA, 2250 bp, Artificial Sequence
  derived and/or modified sequence
atggcgcacagaaaactcgagagtgtaggctctggaatgcttgatcatcgggtgcgcccaggaccagttccgcattctcaggaaccggagagcgaagacatggagctcccgttagaggggtacgttcccgagggcttggagcttgccgcactgagacccgaatccccagctccagaggaacaggaatgccataatcattccccagatggagactcatccagcgattatgtgaacaacacatccgaggaggaagactatgatgaggggttaccagaggaagaagagggtattacgtattatataagatactgcccggaagacgactcctacctcgaggggatggactgtaacggggaagagtacctggctcacagcgcacacccagtcgacaccgacgagtgccaggaggcagtcgaggaatggacggactccgccggtccacatccccatggccatgaggcagaaggatcacaagattatcctgacggtcagctgccaatccctgaggatgagccatccgtattagaagcgcatgaccaggaggaggatgggcactattgcgccagcaaggagggctatcaggattattaccccgaggaggcaaacgggaacactggagcatctccctatcgactcagaaggggggacggggacctggaagatcaagaagaggacatagatcagatcgttgccgagataaagatgtcgctgagcatgacttcaatcacctcggcctcggaggcgagtccagagcacggcccagagcctggcccagaagacagtgtcgaagcatgtcctcccattaaggccagttgttctccttcccgtcatgaagcgagacccaaatcccttaacctgcttcccgaagccaaacacccaggagaccctcagcgaggctttaagcccaaaacacgtaccccggaagaacgcctgaagtggccccatgaacaagtgtgtaacggtttagagcagccaagaaaacaacagagaagcgacctgaacggacccgtggacaataacaacatacccgagactaagaaagtcgcctcatttcccagtttcgtcgcagttcctgggccttgcgagcccgaggacctgattgatggaattatattcgccgctaattacttggggagcacacagctgctctccgaaaggaacccctctaaaaacatccggatgatgcaggcccaggaagcagtgagtagggtgaagcgcatgcagaaggccgcaaaaatcaagaagaaggccaattccgagggggacgcccagaccctgacagaggtggatttgttcatttctactcagagaatcaaggtgttgaacgccgatactcaagaaactatgatggaccatgcactgagaaccattagctacatcgccgatatcggcaatatcgtggtcttaatggccagacgcagaatgccccgttcagcaagccaggactgtatcgagactacgcccggagctcaggaaggtaaaaagcagtacaaaatgatctgccacgtgttcgaatcggaagatgcccagctgatcgctcagtccatagggcaggcattcagcgtggcttaccaggagtttctacgcgctaatggtattaaccccgaggacttgtctcagaaggaatactctgacattatcaatacccaggagatgtacaacgatgatttgattcacttcagtaactccgagaattgcaaagagttgcagctggaaaaacacaaaggtgaaatactgggagttgtggtagtggaatccggatggggaagcatcctacccaccgttatccttgcgaatatgatgaatgggggacctgccgctcgttctggcaaattgtctatcggcgaccagattatgtctatcaacggcactagccttgtcggactacctctcgcgacatgtcagggcattattaaggggctcaaaaatcagacgcaagtcaaactgaatattgtctcctgccctcccgtaacaaccgtcctcatcaagcgaccggatctgaaataccagctcggttttagtgttcagaacggcattatctgttctctaatgcggggtggcatagctgagcgtgggggagttagagtggggcataggataatcgagattaatggccagagcgtggtggcaactgcccatgagaagattgtgcaggcgctgtctaactcagttggcgagatacatatgaaaacaatgcccgctgcaatgtttcgactgctcaccgggcaggaaacaccactttatatttag

SEQ ID NO: 344635 - DNA, 2250 bp, Artificial Sequence
  derived and/or modified sequence
atggcccacagaaaattagagtcagttggctctggtatgctggatcacagggtaagacctgggcctgtgccccattcccaagaaccagagagtgaagatatggagctgccacttgaagggtacgtgccggagggcttagagctggccgcattaagaccagagtcccctgccccagaagagcaggagtgccacaatcacagccccgacggcgatagctcctccgactacgtgaacaataccagtgaagaggaggactatgatgagggactacccgaggaagaagagggtatcacctactacattagatactgtccagaggatgacagttacttggagggcatggactgcaacggagaggaatatctggcccacagcgctcaccctgttgatacagacgagtgccaggaggccgtcgaggagtggaccgattctgcaggaccacatccacacggccatgaggccgagggaagccaggattatccagatggtcagctgcctatcccagaggacgagccaagcgtgttggaggcacacgaccaagaagaggatgggcattactgtgcctctaaggagggatatcaagattactatccagaagaggctaatggcaataccggggcaagcccctatcggttgcgcagaggtgacggcgacctagaagaccaggaggaagacattgaccagatcgtagcagagatcaaaatgagtctctcaatgacgtccattacctccgcttcagaagcctctcccgagcatggccctgagccgggacccgaagacagtgtcgaggcatgcccacctatcaaagcttcttgttccccctcgcgacacgaagcccgtcccaagagcctgaatctccttcccgaggcaaagcatccaggcgacccacagaggggcttcaagcctaaaacgcggacgcctgaagaaaggctcaagtggccccatgagcaggtctgcaacggactggagcaacctagaaagcaacagcggtcggacctcaatgggcctgttgacaataataacattcccgaaaccaagaaggtggcatctttcccgtctttcgtggccgtccctggcccttgcgagcccgaagaccttatagacgggatcatcttcgccgcaaattacctagggtctacccaactactcagcgagcggaacccctccaagaatattaggatgatgcaggcccaagaggccgtctctcgggtaaagagaatgcagaaagccgcaaaaattaaaaaaaaagcaaactccgagggcgatgcacagaccctcactgaagtggacctgtttatctccacccagcgaatcaaagtactgaacgctgatacacaggaaacaatgatggatcacgccctgcggaccatttcctatattgctgacattggaaatatcgtggtgctgatggctagacggagaatgccaagatccgccagtcaggactgtatcgaaactactccaggtgctcaggaggggaaaaagcaatacaagatgatatgtcatgtgttcgagagtgaagacgcccagctgatcgctcagtctatcggacaggccttcagcgtcgcttaccaggaattcttgcgggcaaacggcattaatcctgaagatttgagccaaaaggagtactcagatatcatcaatactcaagaaatgtacaatgatgatcttatacacttttccaactccgagaactgtaaagagctacagcttgaaaagcacaaaggggagatattaggggtggtcgtggtagagagtggctggggttccatcctgccaactgtgatactggcaaacatgatgaatggaggacccgctgcaagaagcggaaagctctctatcggagatcagataatgtccatcaacggaaccagcctcgtaggcctgcctctggctacctgtcagggaattattaaagggctgaaaaaccaaactcaagtgaagctcaatatcgtgagctgtccacctgtcacaactgtacttataaaaaggcctgatctgaaataccaactcggattctctgtacagaacggaatcatctgcagtctgatgaggggaggcatcgccgagagggggggagtgcgcgtgggccacagaatcatagagatcaatggccagtctgtcgttgccaccgcccatgaaaagattgtgcaggccctgagcaattctgtgggagagattcacatgaaaacgatgcctgccgcaatgttcagactcctgacgggccaagagacacccctctatatctag

SEQ ID NO: 344636 - DNA, 2250 bp, Artificial Sequence
  derived and/or modified sequence
atggcccaccggaagttggaaagcgtgggcagcggcatgctcgatcacagagtccgcccaggacccgtgccccatagccaggagccagaatctgaggacatggagctccctctcgaggggtatgtacccgagggcctggagctcgccgctctgaggcccgaaagccccgctcccgaagaacaggagtgtcacaatcacagccctgatggggattcgtcaagcgattatgtgaacaatacttcagaggaagaggactacgatgagggcctgcctgaggaggaagagggaatcacctattacatccgttattgtcccgaggacgacagctatctcgaggggatggactgtaacggagaggagtacctagcacacagcgcgcaccccgtggataccgacgaatgtcaggaggctgtagaggagtggacagattccgcaggaccgcaccctcacggccacgaggctgaggggtctcaggattacccagacggtcaactgcccatacctgaggacgagccatcagtgcttgaggctcacgatcaggaggaggatggtcattactgtgcctctaaagagggataccaagattactatcctgaagaagccaacggcaacaccggagcctccccctaccgccttaggcggggtgatggagacttggaggatcaggaagaggacattgaccagattgtagcagagatcaaaatgtccctcagtatgacctcaatcactagtgcatctgaggccagcccagaacatggtcccgaacccggaccagaagactctgtcgaggcatgcccaccaataaaggcctcctgttcacctagcaggcacgaagcccgtccgaagagcctcaatctgcttcccgaggccaagcaccccggagacccacaacgcggattcaaacccaagacaaggacccctgaagaaaggctgaagtggccgcatgaacaggtatgtaacgggctcgaacaacctagaaagcagcaaagaagcgatttaaacggccctgttgacaataacaatattcccgagaccaaaaaggttgcatctttcccatcttttgttgccgtgcccggtccctgtgagcctgaggacctgatcgatggtatcatcttcgcagcaaattacctgggctccacccagttgctcagcgaacggaatccgtcaaaaaatattcgtatgatgcaggcacaagaagctgtgtcaagagttaaaagaatgcagaaagcggctaaaattaagaagaaagcaaatagcgaaggtgatgctcagactctgaccgaagttgacctgttcatctccactcaacgcatcaaggtgctaaacgcagatacccaagagactatgatggaccatgcgctgaggacaatcagttacatagcagacatcggcaatatagtagttctcatggctcgcagacggatgcccaggtcagcctcacaggactgtatcgaaaccacccctggtgcccaggaggggaagaaacagtacaagatgatctgccatgtatttgaatctgaagacgcccaactgattgcccagtcaatcggacaggctttcagtgtggcataccaggagtttctgcgagccaatggaatcaaccctgaggacctctctcagaaagaatactcggatatcattaacacacaagagatgtacaacgacgatctgatccatttcagcaacagcgagaactgcaaagagctacaattagaaaagcataagggagagattttgggtgttgtggtagtcgaatctgggtgggggtctatccttcctacagtcatccttgctaacatgatgaatggcggtccagccgcaagaagtgggaaactctcaattggcgaccagattatgtcaatcaacgggacgtcgctggtggggcttcctcttgcaacttgtcagggcataatcaaaggcctgaagaatcagactcaagtgaaactgaatatcgtatcctgcccacccgtaactactgtgttaattaagaggccagacctgaagtatcagttgggcttcagcgtccagaatgggataatatgttccctgatgagggggggaatcgctgagagaggtggcgtcagagtcggccaccggatcatcgaaatcaatgggcagagtgttgtggcgactgcccatgagaaaatagtgcaggccttgagcaacagcgtgggggaaattcatatgaaaactatgcctgccgctatgtttaggctgctgaccggtcaggagacacccctctatatttag

SEQ ID NO: 344637 - DNA, 2259 bp, Artificial Sequence
  derived and/or modified sequence
acaacggccatggctcacaggaagcttgaatcggtgggaagtgggatgctggaccacagggtgaggcccggtcctgtgccacacagtcaggagcccgagagcgaggacatggagctccccttagagggatacgtccccgaaggcttagagctggccgcactgagacctgaatctccagccccagaggagcaagaatgccacaatcatagccctgacggcgactcatcttctgattacgtaaataacacctctgaagaagaggattatgacgaggggctacctgaggaggaggagggaataacctactacataaggtattgccctgaggatgattcctacctcgaggggatggattgtaatggagaggagtacctggcccatagcgcgcaccccgtcgacacagacgaatgccaagaggccgtagaagagtggaccgacagtgcagggcctcacccccatgggcatgaggctgagggatcgcaggattaccccgacgggcagctgcctattcccgaagacgagccgtcagttctcgaggcccacgatcaggaggaggacggccactactgcgcttctaaggaaggctaccaggattactacccggaagaggcaaatgggaacacaggcgcaagcccttataggctacgcagaggggacggcgatctggaagaccaggaagaggatatagatcagatcgtggctgagattaagatgagcctgagtatgacatctatcacctcggcgagtgaggcttcccccgagcacggacccgagcctgggccagaggacagtgtggaagcctgtcctcccatcaaggcaagttgctccccatcaaggcatgaagccaggcccaaaagcctgaatctgctacccgaggcaaagcaccctggggatcctcaacgcggtttcaagccaaaaacccggaccccagaagaacgactgaagtggccacacgagcaggtttgcaacggcctggaacagcccagaaagcagcaacgctcagacttaaatggcccagtagataataataatattcctgagacaaagaaggtggccagctttcccagctttgtggcagtgccaggcccttgtgaacccgaagatttgattgacggtattatcttcgcagctaactacctcgggagcacccaactcctctccgaaagaaacccttccaagaacatccgtatgatgcaagcccaggaagccgtctctcgtgtcaaaaggatgcagaaggccgctaagattaagaagaaagctaatagtgagggcgacgcgcagacgttgaccgaagtggatctgttcatctctacacaacgcatcaaagtgctaaacgcagacacgcaagagacgatgatggaccacgccttaaggactatatcttacatcgccgacataggcaacatcgttgtgttaatggccaggaggcggatgcccaggtccgcgtcacaagactgtatcgagacaaccccgggagcgcaggaaggtaagaagcagtataaaatgatttgccacgtctttgagtccgaggacgcccaacttatcgcccagtccattggacaagccttctctgtcgcataccaagagttcttacgggcaaacggaattaaccctgaggacctctctcagaaagagtattccgacattattaacacccaagaaatgtacaatgatgacttaattcacttcagcaattccgagaactgtaaagagctacagctggaaaagcacaaaggtgagattctgggcgttgtggttgtcgagtccgggtgggggtcaatcctcccaactgttattctggccaacatgatgaacggaggaccagctgccagatccgggaaattgtctattggagaccaaatcatgtctatcaacggtaccagtctggtgggcctccccttagctacctgtcagggaatcatcaaaggtttaaagaaccagacacaggtgaagctgaatatcgtctcttgcccccctgtcacaacagtgctcatcaagagaccagacctgaagtatcaactgggattcagcgtccagaatgggatcatctgttcgctcatgagaggaggcatagcagagcgaggaggcgtcagggtcggccatcgcataatagaaataaatggacagtctgtggtcgcaactgcacatgagaagatagttcaggctttgagtaattccgtgggtgagatacacatgaagactatgcctgctgccatgtttcggctcctcactggtcaggagacgccgctgtatatctag

SEQ ID NO: 344638 - DNA, 84 bp, Artificial Sequence
  derived and/or modified sequence
atggcccacagaaagctggagagcgtgggcagcggcatgctggaccacagagtgagacccggccccgtgccccacagccagtag

SEQ ID NO: 344639 - DNA, 2250 bp, Artificial Sequence
  derived and/or modified sequence
atggcccacagaaagctggagagcgtgggcagcggcatgctggaccacagagtgagacccggccccgtgccccacagccaggagcccgagagcgaggacatggagctgcccctggagggctacgtgcccgagggcctggagctggccgccctgagacccgagagccccgcccccgaggagcaggagtgccacaaccacagccccgacggcgacagcagcagcgactacgtgaacaacaccagcgaggaggaggactacgacgagggcctgcccgaggaggaggagggcatcacctactacatcagatactgccccgaggacgacagctacctggagggcatggactgcaacggcgaggagtacctggcccacagcgcccaccccgtggacaccgacgagtgccaggaggccgtggaggagtggaccgacagcgccggcccccacccccacggccacgaggccgagggcagccaggactaccccgacggccagctgcccatccccgaggacgagcccagcgtgctggaggcccacgaccaggaggaggacggccactactgcgccagcaaggagggctaccaggactactaccccgaggaggccaacggcaacaccggcgccagcccctacagactgagaagaggcgacggcgacctggaggaccaggaggaggacatcgaccagatcgtggccgagatcaagatgagcctgagcatgaccagcatcaccagcgccagcgaggccagccccgagcacggccccgagcccggccccgaggacagcgtggaggcctgcccccccatcaaggccagctgcagccccagcagacacgaggccagacccaagagcctgaacctgctgcccgaggccaagcaccccggcgacccccagagaggcttcaagcccaagaccagaacccccgaggagagactgaagtggccccacgagcaggtgtgcaacggcctggagcagcccagaaagcagcagagaagcgacctgaacggccccgtggacaacaacaacatccccgagaccaagaaggtggccagcttccccagcttcgtggccgtgcccggcccctgcgagcccgaggacctgatcgacggcatcatcttcgccgccaactacctgggcagcacccagctgctgagcgagagaaaccccagcaagaacatcagaatgatgcaggcccaggaggccgtgagcagagtgaagagaatgcagaaggccgccaagatcaagaagaaggccaacagcgagggcgacgcccagaccctgaccgaggtggacctgttcatcagcacccagagaatcaaggtgctgaacgccgacacccaggagaccatgatggaccacgccctgagaaccatcagctacatcgccgacatcggcaacatcgtggtgctgatggccagaagaagaatgcccagaagcgccagccaggactgcatcgagaccacccccggcgcccaggagggcaagaagcagtacaagatgatctgccacgtgttcgagagcgaggacgcccagctgatcgcccagagcatcggccaggccttcagcgtggcctaccaggagttcctgagagccaacggcatcaaccccgaggacctgagccagaaggagtacagcgacatcatcaacacccaggagatgtacaacgacgacctgatccacttcagcaacagcgagaactgcaaggagctgcagctggagaagcacaagggcgagatcctgggcgtggtggtggtggagagcggctggggcagcatcctgcccaccgtgatcctggccaacatgatgaacggcggccccgccgccagaagcggcaagctgagcatcggcgaccagatcatgagcatcaacggcaccagcctggtgggcctgcccctggccacctgccagggcatcatcaagggcctgaagaaccagacccaggtgaagctgaacatcgtgagctgcccccccgtgaccaccgtgctgatcaagagacccgacctgaagtaccagctgggcttcagcgtgcagaacggcatcatctgcagcctgatgagaggcggcatcgccgagagaggcggcgtgagagtgggccacagaatcatcgagatcaacggccagagcgtggtggccaccgcccacgagaagatcgtgcaggccctgagcaacagcgtgggcgagatccacatgaagaccatgcccgccgccatgttcagactgctgaccggccaggagacccccctgtacatctag

SEQ ID NO: 344640 - DNA, 2259 bp, Artificial Sequence
  derived and/or modified sequence
accaccgccatggcccacagaaagctggagagcgtgggcagcggcatgctggaccacagagtgagacccggccccgtgccccacagccaggagcccgagagcgaggacatggagctgcccctggagggctacgtgcccgagggcctggagctggccgccctgagacccgagagccccgcccccgaggagcaggagtgccacaaccacagccccgacggcgacagcagcagcgactacgtgaacaacaccagcgaggaggaggactacgacgagggcctgcccgaggaggaggagggcatcacctactacatcagatactgccccgaggacgacagctacctggagggcatggactgcaacggcgaggagtacctggcccacagcgcccaccccgtggacaccgacgagtgccaggaggccgtggaggagtggaccgacagcgccggcccccacccccacggccacgaggccgagggcagccaggactaccccgacggccagctgcccatccccgaggacgagcccagcgtgctggaggcccacgaccaggaggaggacggccactactgcgccagcaaggagggctaccaggactactaccccgaggaggccaacggcaacaccggcgccagcccctacagactgagaagaggcgacggcgacctggaggaccaggaggaggacatcgaccagatcgtggccgagatcaagatgagcctgagcatgaccagcatcaccagcgccagcgaggccagccccgagcacggccccgagcccggccccgaggacagcgtggaggcctgcccccccatcaaggccagctgcagccccagcagacacgaggccagacccaagagcctgaacctgctgcccgaggccaagcaccccggcgacccccagagaggcttcaagcccaagaccagaacccccgaggagagactgaagtggccccacgagcaggtgtgcaacggcctggagcagcccagaaagcagcagagaagcgacctgaacggccccgtggacaacaacaacatccccgagaccaagaaggtggccagcttccccagcttcgtggccgtgcccggcccctgcgagcccgaggacctgatcgacggcatcatcttcgccgccaactacctgggcagcacccagctgctgagcgagagaaaccccagcaagaacatcagaatgatgcaggcccaggaggccgtgagcagagtgaagagaatgcagaaggccgccaagatcaagaagaaggccaacagcgagggcgacgcccagaccctgaccgaggtggacctgttcatcagcacccagagaatcaaggtgctgaacgccgacacccaggagaccatgatggaccacgccctgagaaccatcagctacatcgccgacatcggcaacatcgtggtgctgatggccagaagaagaatgcccagaagcgccagccaggactgcatcgagaccacccccggcgcccaggagggcaagaagcagtacaagatgatctgccacgtgttcgagagcgaggacgcccagctgatcgcccagagcatcggccaggccttcagcgtggcctaccaggagttcctgagagccaacggcatcaaccccgaggacctgagccagaaggagtacagcgacatcatcaacacccaggagatgtacaacgacgacctgatccacttcagcaacagcgagaactgcaaggagctgcagctggagaagcacaagggcgagatcctgggcgtggtggtggtggagagcggctggggcagcatcctgcccaccgtgatcctggccaacatgatgaacggcggccccgccgccagaagcggcaagctgagcatcggcgaccagatcatgagcatcaacggcaccagcctggtgggcctgcccctggccacctgccagggcatcatcaagggcctgaagaaccagacccaggtgaagctgaacatcgtgagctgcccccccgtgaccaccgtgctgatcaagagacccgacctgaagtaccagctgggcttcagcgtgcagaacggcatcatctgcagcctgatgagaggcggcatcgccgagagaggcggcgtgagagtgggccacagaatcatcgagatcaacggccagagcgtggtggccaccgcccacgagaagatcgtgcaggccctgagcaacagcgtgggcgagatccacatgaagaccatgcccgccgccatgttcagactgctgaccggccaggagacccccctgtacatctag

SEQ ID NO: 344641 - protein, 27 aa, Artificial Sequence
  derived and/or modified sequence
MAHRKLESVGSGMLDHRVRPGPVPHSQ

SEQ ID NO: 344642 - protein, 70 aa, Artificial Sequence
  derived and/or modified sequence
MAHRKLESVGSGMLDHRVRPGPVPHSQEPESEDMELPLEGYVPEGLELAALRPESPAPEEQECHNHSPDG

SEQ ID NO: 344643 - DNA, 795 bp, Artificial Sequence
  derived and/or modified sequence
atggcccaccggaagttggaatcagtggggagcggaatgctggatcaccgagtccgccccggacccgtgcctcacagccaggagccagagagtgaggacatggagctgccacttgagggttacgttcctgagggactcgaactggccgctctgaggccggaaagcccagctcctgaggagcaagaatgtcataaccactcccctgatggagactcatcttctgattatgtaaataacacatccgaagaggaggactatgacgagggcctgcccgaggaggaggagggaataacctattatattcgatattgcccggaggacgactcctacctggagggcatggattgtaacggggaggaatatctagcacatagcgcacaccccgtcgatactgatgaatgccaggaagcagtggaggaatggacagacagtgccggcccccatccccacggccatgaggcggaaggctcacaagattacccggacggtcagcttccaattccagaggacgagccgagcgttctagaggcacacgatcaggaagaggatggacactattgtgctagcaaggaagggtatcaggattactatccagaggaggccaacggtaatacaggggcctccccctacaggctgagaagaggggacggcgatcttgaggatcaggaagaagacatcgaccagatagttgccgagatcaagatgtctctctctatgacatcaattaccagcgcgagcgaggcctcccccgaacatggccccgaacccggacccgaagactccgtggaggcgtag

SEQ ID NO: 344644 - DNA, 213 bp, Artificial Sequence
  derived and/or modified sequence
atggcccatagaaaacttgaatccgtgggtagtggcatgctcgatcatagagtaaggcctgggcccgtgcctcacagccaagagccggagtctgaagatatggagctgcccctggagggttatgttccagagggcttagagttggccgctcttcgacctgagagtcctgcaccagaagaacaggagtgtcacaatcattctccagatgggtag

SEQ ID NO: 344645 - DNA, 339 bp, Artificial Sequence
  derived and/or modified sequence
atggcccatcgaaagctagagtctgtgggatccggcatgctggaccatcgtgtgcggcctggacccgtgccccactcacaggagccagagtcagaagacatggagttgccattggaaggatacgtgccagagggacttgagctcgccgctctcagacccgagtcacctgccccggaggagcaggagtgccataaccatagtccagatggcgattcctcttccgattacgtcaacaacacgagtgaagaggaagactatgatgaaggactacccgaagaggaggaggggataacatactatatcaggtactgccctgaggacgacagctatttggagtag

SEQ ID NO: 344646 - DNA, 795 bp, Artificial Sequence
  derived and/or modified sequence
atggcccacaggaagctggagagcgtgggcagcggcatgctggaccaccgggtgcggcccggccctgtgccccacagccaggagcctgagagcgaggacatggagctgcccctggagggctacgtgcctgagggcctggagctggccgccctgcggcctgagagccctgcccctgaggagcaggagtgccacaaccacagcccagatggagacagcagcagtgactatgtgaacaacaccagcgaggaggaggactatgatgagggcctgcctgaggaggaggagggcatcacctactacatccgctactgcccagaagatgacagctacctggagggcatggactgcaatggagaggagtacctggcccacagcgcccaccctgtggacacagatgagtgccaggaggccgtggaggagtggacagacagcgctggcccccacccccacggccacgaggccgagggcagccaggactacccagatggccagctgcccatcccagaagatgagcccagcgtgctggaggcccatgaccaggaggaggatggccactactgtgccagcaaggagggctaccaggactactacccagaggaggccaacggcaacacaggagccagcccctaccgcctgcggagaggagatggagacctggaggaccaggaggaggacatcgaccagatcgtggccgagatcaagatgagcctgtccatgaccagcatcaccagcgccagcgaggccagccctgagcacggccctgagcccggcccagaagattctgtggaggcctag

SEQ ID NO: 344647 - DNA, 213 bp, Artificial Sequence
  derived and/or modified sequence
atggcccacaggaagctggagagcgtgggcagcggcatgctggaccaccgggtgcggcccggccctgtgccccacagccaggagcctgagagcgaggacatggagctgcccctggagggctacgtgcctgagggcctggagctggccgccctgcggcctgagagccctgcccctgaggagcaggagtgccacaaccacagcccagatggatag

SEQ ID NO: 344648 - DNA, 339 bp, Artificial Sequence
  derived and/or modified sequence
atggcccacaggaagctggagagcgtgggcagcggcatgctggaccaccgggtgcggcccggccctgtgccccacagccaggagcctgagagcgaggacatggagctgcccctggagggctacgtgcctgagggcctggagctggccgccctgcggcctgagagccctgcccctgaggagcaggagtgccacaaccacagcccagatggagacagcagcagtgactatgtgaacaacaccagcgaggaggaggactatgatgagggcctgcctgaggaggaggagggcatcacctactacatccgctactgcccagaagatgacagctacctggagtag

SEQ ID NO: 344649 - DNA, 795 bp, Artificial Sequence
  derived and/or modified sequence
atggcccaccggaagctggagagcgtgggcagcggcatgctggaccatagagtgcgcccagggccagttcctcactcgcaagaacctgagagtgaggacatggaactgcccctggaggggtatgtgccggagggcctcgaacttgccgccctgagaccagagtctcctgcaccggaggagcaagaatgtcataaccacagccccgatggcgactcctcttcggattatgttaataatacttctgaagaggaagattacgatgagggcctcccagaagaagaagagggtattacctattatattcgatattgtccggaagacgacagttatctggagggtatggactgcaatggggaggagtacctggctcacagcgcacatcctgtggatacagatgaatgccaagaggccgtcgaggaatggaccgactccgcaggcccgcacccccatggccatgaagcagaggggagtcaggactacccagatggccaacttcccattcctgaggatgaaccaagcgtactggaggcacacgaccaggaggaggacggacactattgtgccagtaaagagggctatcaggactactatccggaggaagctaacggaaatacaggagcatcaccctacagattaagacgaggcgatggagatctcgaagaccaggaggaagacatcgatcaaattgtggcagaaattaaaatgtcactgagtatgacaagcattactagcgctagtgaggctagtcctgaacacggccccgaacctggccccgaagattctgtcgaggcttag

SEQ ID NO: 344650 - DNA, 213 bp, Artificial Sequence
  derived and/or modified sequence
atggcccaccggaagctggagagcgtgggcagcggcatgctggaccacagggtccgccctgggcctgtgccccactctcaggagcccgagagcgaagatatggagctcccattggaaggatacgtgccagagggccttgagttagccgctttaagacccgaatctcccgcccctgaagaacaagagtgtcacaaccacagtccagatggctag

SEQ ID NO: 344651 - DNA, 339 bp, Artificial Sequence
  derived and/or modified sequence
atggcccaccggaagctggagagcgtgggcagcggcatgctggaccaccgtgttcgccccggacctgtgccacattctcaggaacctgagagcgaggatatggaattgccgttggagggctatgtgccagaaggactggagctggccgcccttaggcctgaaagtcctgctcctgaggaacaggagtgtcacaatcactcaccagatggagattccagcagcgactacgtcaacaatactagcgaggaagaagattatgatgaaggactgcccgaagaggaggaggggatcacatattatattaggtattgcccggaagacgactcctatttggagtag

SEQ ID NO: 344652 - DNA, 554 bp, Artificial Sequence
  derived and/or modified sequence
cagctcagccccactgcaaggagctcctgggtttatttaagtgagcctcagataactttacataaaagcaaatgtgtaaaaagcgataaagtcagatatattgaacatttgtcctgagggcaaatttctgagctctaaaagccagtttggttttagataacatctgtgagtctggaaacaggctgagatactctatatctgcactcccaactctgcctttggctttgtgagccctgtggtctccttgaaagaattggtccccagtgggtgaactaatcacccatgaagagtctcccaattcaaatctggaataaaaagtgaggacatgggggcagaatgttactcatcacatgtggcccgtcagtactagacttcaagaaagatttgatcaccaggagatttttcgggacattaccaaaccactcattttagtggctgcctccgggtgatgatggctgtgtgaacgactgccatggcccaccggaagcttgagagcgtggggagcggcatgttggaccatagggtgagaccaggtcctgtccctcacagccagg

SEQ ID NO: 344653 - DNA, 936 bp, Artificial Sequence
  derived and/or modified sequence
agtggtgagcacggtgtcgggggccgcattagctattgatttatgtgctgttatagaattaattgagtctggacatggagactcattttcttggacatgtagcagtggctgcctccgggtgatgatggctgtgtgaacgactgccatggcccaccggaagcttgagagcgtggggagcggcatgttggaccatagggtgagaccaggtcctgtccctcacagccaggagcccgagagcgaggacatggagctgcccttggagggctatgtgcccgagggcctggagctggctgccctgcggccagagagccccgcgccagaggaacaggagtgccacaaccacagccccgatggggactccagctctgactacgtgaacaacacctctgaggaggaggactatgacgagggcctccctgaggaggaggagggcatcacctactacatccgctactgccctgaggacgacagctacctagagggcatggactgcaacggggaggagtacctggcccacagtgcacaccctgtggacactgatgagtgccaggaggcggtggaggagtggacggactcggcgggcccgcacccccacggccacgaggctgaaggcagccaggactacccagacggccaactgcccattccggaggatgagccctccgtccttgaggcccatgaccaggaagaagatggtcactactgtgccagcaaagagggctaccaggactactaccccgaggaggccaacgggaacaccggcgcctccccctaccgcctgaggcgtggggatggggacctggaggaccaggaggaggacattgaccagatcgtggcagagatcaagatgagtctgagcatgaccagcatcaccagcgccagtgaggccagccccgagcatgggcctgagccagggcctgaggactctgtagaggc

SEQ ID NO: 344654 - DNA, 535 bp, Artificial Sequence
  derived and/or modified sequence
aacaaccgctgacttcctggttcctgggtgccgcatcactgcccctctgctccgggtcaaaccggctgtatgcttagcttcaggaacatgtggcaggtggcagcccccggccccgtggcagtctcctgaatatttacgcgttgctgaatctcctgtggacaaaccaccaataggccaggactgtcctgtggacagacggggtgagcctcttcttgtgtctggagattctgaaaagatttgatcaccaggagatttttcgggacattaccaaaccactcattttagtggctgcctccgggtgatgatggctgtgtgaacgactgccatggcccaccggaagcttgagagcgtggggagcggcatgttggaccatagggtgagaccaggtcctgtccctcacagccaggagcccgagagcgaggacatggagctgcccttggagggctatgtgcccgagggcctggagctggctgccctgcggccagagagccccgcgccagaggaacaggagtgccacaaccacagccccgatggg

SEQ ID NO: 344655 - DNA, 711 bp, Artificial Sequence
  derived and/or modified sequence
gcagatgagggcctgcttgggtctggggcgtcagtggggattggctgcaggcagccatgaggagccttcagggtgatgagggttctaaaagtgcgtcgtgtgcctgagccactgcgacattcactagaagtcctccgtgctgacggagggtgaactgtgtggggcccaagttctatctcaggaaagccagggaagccactcagttcagctttgtgaaaatcaagggagtcttcttggaggaagtggactctgagctggatgtgaatgacggagtgtctttgaaagatttgatcaccaggagatttttcgggacattaccaaaccactcattttagtggctgcctccgggtgatgatggctgtgtgaacgactgccatggcccaccggaagcttgagagcgtggggagcggcatgttggaccatagggtgagaccaggtcctgtccctcacagccaggagcccgagagcgaggacatggagctgcccttggagggctatgtgcccgagggcctggagctggctgccctgcggccagagagccccgcgccagaggaacaggagtgccacaaccacagccccgatggggactccagctctgactacgtgaacaacacctctgaggaggaggactatgacgagggcctccctgaggaggaggagggcatcacctactacatccgctactgccctgaggacgacagctacctagag

SEQ ID NO: 344656 - DNA, 795 bp, Artificial Sequence
  derived and/or modified sequence
atggcgcatcgtaagctcgagtccgtcggtagcggcatgctcgatcatagggtgcgtccgggacctgtgccacattcccaggagcctgagtcagaagacatggaattgccgctggaggggtacgtacctgaaggattagaattggcggcactcaggccagaatcccccgctcccgaggagcaggagtgccataatcactccccagacggagacagctcttccgattacgtgaataacacatccgaggaggaagattatgacgaaggattgccagaggaggaagaagggatcacgtattatattaggtattgtccggaagacgactcttacctggagggaatggactgtaatggcgaggaatacctcgctcactctgcacatccggtcgataccgatgaatgtcaggaagctgtagaagagtggacagactcagccggacctcatcctcacgggcacgaggctgagggatctcaagactatccagacggccagctgccaattccagaagacgagccgtccgtgttggaggcgcacgaccaagaggaggatggccattactgcgctagtaaagagggctatcaggattactaccctgaagaggcgaacggcaacaccggtgcttccccttacaggttgcgcaggggagacggggatttagaggaccaggaggaggatattgatcagattgttgctgagatcaaaatgtctctctcaatgacctcaattactagcgcgtctgaggccagccccgagcacgggccagaacctgggccagaggattccgtcgaggcctag

SEQ ID NO: 344657 - DNA, 213 bp, Artificial Sequence
  derived and/or modified sequence
atggcccatcgtaagttggagagcgtgggcagcggaatgctggatcatcgggtccggcctgggccagtgccgcactcccaggagcccgagagcgaggacatggagctgcctcttgaagggtatgtgccggagggtttagagctggcagcacttaggcccgagagccccgcacccgaagagcaggaatgccataatcatagcccagacgggtag

SEQ ID NO: 344658 - DNA, 339 bp, Artificial Sequence
  derived and/or modified sequence
atggcccaccggaagctggagtccgtgggcagcggaatgctggatcatcgggttcggcctggcccagtgccccacagccaagagccggaaagtgaagacatggaattgcccctagagggctacgttcctgaagggttagagctagcagctctgaggcccgagtcgcctgccccagaagagcaggagtgtcataaccattcccctgacggagatagctcatcagactatgttaataataccagtgaggaggaggactacgacgagggcctacccgaggaagaagaaggtattacctactatattcggtactgccccgaggatgattcatatttggaatag

SEQ ID NO: 344659 - DNA, 795 bp, Artificial Sequence
  derived and/or modified sequence
atggcccacagaaagctggagagcgtgggcagcggcatgctggaccacagagtgagacccggccccgtgccccacagccaggagcccgagagcgaggacatggagctgcccctggagggctacgtgcccgagggcctggagctggccgccctgagacccgagagccccgcccccgaggagcaggagtgccacaaccacagccccgacggcgacagcagcagcgactacgtgaacaacaccagcgaggaggaggactacgacgagggcctgcccgaggaggaggagggcatcacctactacatcagatactgccccgaggacgacagctacctggagggcatggactgcaacggcgaggagtacctggcccacagcgcccaccccgtggacaccgacgagtgccaggaggccgtggaggagtggaccgacagcgccggcccccacccccacggccacgaggccgagggcagccaggactaccccgacggccagctgcccatccccgaggacgagcccagcgtgctggaggcccacgaccaggaggaggacggccactactgcgccagcaaggagggctaccaggactactaccccgaggaggccaacggcaacaccggcgccagcccctacagactgagaagaggcgacggcgacctggaggaccaggaggaggacatcgaccagatcgtggccgagatcaagatgagcctgagcatgaccagcatcaccagcgccagcgaggccagccccgagcacggccccgagcccggccccgaggacagcgtggaggcctag

SEQ ID NO: 344660 - DNA, 213 bp, Artificial Sequence
  derived and/or modified sequence
atggcccacagaaagctggagagcgtgggcagcggcatgctggaccacagagtgagacccggccccgtgccccacagccaggagcccgagagcgaggacatggagctgcccctggagggctacgtgcccgagggcctggagctggccgccctgagacccgagagccccgcccccgaggagcaggagtgccacaaccacagccccgacggctag

SEQ ID NO: 344661 - DNA, 339 bp, Artificial Sequence
  derived and/or modified sequence
atggcccacagaaagctggagagcgtgggcagcggcatgctggaccacagagtgagacccggccccgtgccccacagccaggagcccgagagcgaggacatggagctgcccctggagggctacgtgcccgagggcctggagctggccgccctgagacccgagagccccgcccccgaggagcaggagtgccacaaccacagccccgacggcgacagcagcagcgactacgtgaacaacaccagcgaggaggaggactacgacgagggcctgcccgaggaggaggagggcatcacctactacatcagatactgccccgaggacgacagctacctggagtag

SEQ ID NO: 344662 - DNA, 528 bp, Artificial Sequence
  derived and/or modified sequence
atgacccggcccctgcctgagagcatccggctgctgcggcacacaggcctggtgccccccacccctgtgcccctgggctacccccaccagagctttgtgtcccagccccaccccttcagcaagcagcccagcccctgcccccggcagagcccccagggcgactttggctgggtgtcccctggggccagccgcagcatcaccggccccagcagccctgctgcccccagcctcatcagcctgggcagcctgggcagccacctgcagggcgcccggccccacccccggcagagcagcctgggggactttggcctggtgaccccaggcaccccctgctgccgcctgtgcccccccctgctgctgccccagggccggcccccctgggtgctgtgtgccggcgtgtccaaggagctgggccccaaccctgtgctgcccagccccatcgtggagcagaggctgggccacggggctgacatggtgcccccaccagaccaggaggagtggaatgtggtgatgagccagagcacctag

SEQ ID NO: 344663 - DNA, 1604 bp, Artificial Sequence
  derived and/or modified sequence
gagcctccaagtgtccacaccctgtgtgtcctctgtcctgccagcaccgagggctcatccatccacagagcagtgcagtgggaggagacgccatgacccccatcctcacggtcctgatctgtctcgggctgagcctggaccccaggacccacgtgcaggcagggcccctccccaagcccaccctctgggctgagccaggctctgtgatcacccaagggagtcctgtgaccctcaggtgtcaggggagcctggagacgcaggagtaccatctatatagagaaaagaaaacagcactctggattacacggatcccacaggagcttgtgaagaagggccagttccccatcctatccatcacctgggaacatgcagggcggtattgctgtatctatggcagccacactgcaggcctctcagagagcagtgaccccctggagctggtggtgacaggagcctacagcaaacccaccctctcagctctgcccagccctgtggtgacctcaggagggaatgtgaccatccagtgtgactcacaggtggcatttgatggcttcattctgtgtaaggaaggagaagatgaacacccacaatgcctgaactcccattcccatgcccgtgggtcatcccgggccatcttctccgtgggccccgtgagcccaagtcgcaggtggtcgtacaggtgctatggttatgactcgcgcgctccctatgtgtggtctctacccagtgatctcctggggctcctggtcccaggtgtttctaagaagccatcactctcagtgcagccgggtcctgtcgtggcccctggggagaagctgaccttccagtgtggctctgatgccggctacgacagatttgttctgtacaaggagtggggacgtgacttcctccagcgccctggccggcagccccaggctgggctctcccaggccaacttcaccctgggccctgtgagccgctcctacgggggccagtacacatgctccggtgcatacaacctctcctccgagtggtcggcccccagcgaccccctggacatcctgatcacaggacagatccgtgccagacccttcctctccgtgcggccgggccccacagtggcctcaggagagaacgtgaccctgctgtgtcagtcacagggagggatgcacactttccttttgaccaaggagggggcagctgattccccgctgcgtctaaaatcaaagcgccaatctcataagtaccaggctgaattccccatgagtcctgtgacctcggcccacgcggggacctacaggtgctacggctcactcagctccaacccctacctgctgactcaccccagtgaccccctggagctcgtggtctcaggagcagctgagaccctcagcccaccacaaaacaagtccgactccaaggctggtgagtgaggagatgcttgccgtgatgacgctgggcacagagggtcaggtcctgtcaagaggagctgggtgtcctgggtggacatttgaagaattatattcattccaacttgaagaattattcaacacctttaacaatgtatatgtgaagtactttattctttcatattttaaaaataaaagataattatccatgagaaa

SEQ ID NO: 344664 - protein, 439 aa, Artificial Sequence
  derived and/or modified sequence
MTPILTVLICLGLSLDPRTHVQAGPLPKPTLWAEPGSVITQGSPVTLRCQGSLETQEYHLYREKKTALWITRIPQELVKKGQFPILSITWEHAGRYCCIYGSHTAGLSESSDPLELVVTGAYSKPTLSALPSPVVTSGGNVTIQCDSQVAFDGFILCKEGEDEHPQCLNSHSHARGSSRAIFSVGPVSPSRRWSYRCYGYDSRAPYVWSLPSDLLGLLVPGVSKKPSLSVQPGPVVAPGEKLTFQCGSDAGYDRFVLYKEWGRDFLQRPGRQPQAGLSQANFTLGPVSRSYGGQYTCSGAYNLSSEWSAPSDPLDILITGQIRARPFLSVRPGPTVASGENVTLLCQSQGGMHTFLLTKEGAADSPLRLKSKRQSHKYQAEFPMSPVTSAHAGTYRCYGSLSSNPYLLTHPSDPLELVVSGAAETLSPPQNKSDSKAGE

SEQ ID NO: 344665 - protein, 456 aa, Artificial Sequence
  derived and/or modified sequence
MHRGLIHPQSSAVGGDAMTPILTVLICLGLSLDPRTHVQAGPLPKPTLWAEPGSVITQGSPVTLRCQGSLETQEYHLYREKKTALWITRIPQELVKKGQFPILSITWEHAGRYCCIYGSHTAGLSESSDPLELVVTGAYSKPTLSALPSPVVTSGGNVTIQCDSQVAFDGFILCKEGEDEHPQCLNSHSHARGSSRAIFSVGPVSPSRRWSYRCYGYDSRAPYVWSLPSDLLGLLVPGVSKKPSLSVQPGPVVAPGEKLTFQCGSDAGYDRFVLYKEWGRDFLQRPGRQPQAGLSQANFTLGPVSRSYGGQYTCSGAYNLSSEWSAPSDPLDILITGQIRARPFLSVRPGPTVASGENVTLLCQSQGGMHTFLLTKEGAADSPLRLKSKRQSHKYQAEFPMSPVTSAHAGTYRCYGSLSSNPYLLTHPSDPLELVVSGAAETLSPPQNKSDSKAGE

SEQ ID NO: 344666 - DNA, 1320 bp, Artificial Sequence
  derived and/or modified sequence
atgacacccattcttacagtgctcatctgtctgggactcagcctggatcctaggacacatgtccaggctggtcccctgccaaaacccacattgtgggcagaacctggaagcgtgatcacacagggatcgcctgtaacactcaggtgccagggctccttggaaacccaggagtatcacctttaccgcgagaaaaaaacagctctatggattacacgcatccctcaggagctcgtgaaaaaaggacagtttccaatactgagtataacatgggaacatgctgggaggtactgttgcatatatgggtcccacaccgctggtttatctgagagttccgatcccttggagttggtcgtgacaggcgcttattccaaaccaaccctttccgctcttccgtcacccgtggtgacctcaggcggtaatgtcactatccagtgtgattcgcaggtcgcctttgatggcttcattctttgcaaggagggcgaggatgagcacccacagtgcctgaatagccacagtcatgctcgaggatcgtctcgggctatatttagcgtcggacctgtgagccccagtcggcgctggagttaccgctgctacggatatgatagcagggcaccatatgtctggtcacttccctccgatttgctcggattacttgtgccgggtgtgagtaaaaagccctccctttccgtgcaacctggcccagtggtcgcccccggggagaagctgacctttcagtgcggttcagacgccggctatgatagatttgtgctctataaggaatgggggcgggattttctacaacgacccggcaggcaaccacaggcagggctgagccaggcgaatttcaccctaggtcccgtgtctaggtcttatggagggcagtacacatgctctggagcttacaatctgtcatctgagtggtcagccccatctgacccactcgacatactgattaccggccagattagagcacggccatttttgtcggttaggccaggacctacagtggctagcggggagaacgtgacactgttatgccagtctcaaggcggcatgcacacgtttcttctgaccaaggagggggcagccgattcaccgttacggttgaagagtaaacgacagagtcacaaatatcaggcagaattccctatgagcccagtaaccagcgcacacgccgggacgtacaggtgctacggtagcctgtctagtaacccgtacctcttaacacacccatcagaccccctcgaactggtcgtgtcaggggctgccgagacgctttcgcccccccagaataagtccgactcaaaggccggcgaatag

SEQ ID NO: 344667 - DNA, 1371 bp, Artificial Sequence
  derived and/or modified sequence
atgcacagaggcttgatccacccacagagcagcgccgtaggcggagatgccatgaccccgattttgacagtcttgatctgcctcggtctctcccttgaccctcgcactcacgtccaggctggaccactcccgaaaccaaccctgtgggcagagccgggtagtgtgattactcagggttctccagtaacgctgcggtgccagggcagtctcgaaacccaagaataccatctgtatagagagaagaaaaccgccttatggattactagaattcctcaggagctggtaaaaaaaggccagtttcctatcctgtccataacctgggaacatgctggtcgatactgctgtatctacgggagccacacagccggactgagtgagagcagcgacccgctagagttggttgtgacaggggcctattccaagccgaccttgtcagctttaccaagtcccgttgtaacatctggaggcaacgttaccatccagtgtgactctcaagtcgccttcgatggcttcattctctgtaaagaaggggaggacgagcatccgcaatgcctgaactctcatagccacgcgagggggtcctccagggcaatcttctccgtgggtcccgtcagtcctagccggaggtggagttaccgctgctacggatacgactctagagccccctacgtttggagtcttccgtcagacctattgggcctgctggtaccaggcgtgagtaaaaagcctagcctgagcgtacagcctggtcccgtggtcgcgcctggagagaagctgacattccagtgcggcagcgatgcgggttacgacagatttgtgctgtataaggaatgggggcgagacttcctgcagcggcccggccggcagccccaggccggcctctctcaggcaaatttcactctaggcccggttagccgatcatatggagggcagtacacatgtagtggcgcgtataatttaagctctgagtggtctgcgccatctgaccccttggacattctgattaccggccagatccgagcccggccgtttctgtcagtcaggccagggccgaccgttgcttctggcgagaatgtgaccctgctctgccagagtcagggcggaatgcatacctttttactcaccaaagagggggcggcagatagccctctgcgcctgaagtctaagcgccagagccataaatatcaagctgagtttccaatgtctcccgttacatccgcacacgcaggcacttatagatgctacgggtccctctcctccaacccttacctccttacacatcccagcgacccgctggagctggtcgttagcggggctgccgaaaccctgtctcccccacaaaacaaatccgattctaaagcgggggagtag

SEQ ID NO: 344668 - DNA, 1320 bp, Artificial Sequence
  derived and/or modified sequence
atgacccccatcctgactgtgctgatctgcctgggcctgagcctggaccccaggacccacgtgcaggccggccccctgcccaagcccaccctgtgggccgagcccggcagcgtcatcacccagggcagccctgtgaccctgcgctgccagggcagcctggagacccaggagtaccacctgtaccgggagaagaagacagccctgtggatcacccgcatcccccaggagctggtgaagaagggccagttccccatcctgagcatcacctgggagcacgccggccgctactgctgcatctacggcagccacacagctggcctgtctgagagcagtgaccccctggagctggtggtgactggagcctacagcaagcccaccctgagcgccctgcccagccctgtggtgaccagcggcggcaatgtgaccatccagtgtgacagccaggtggcctttgatggcttcatcctgtgcaaggagggagaagatgagcacccccagtgcctgaacagccacagccacgcccggggcagcagccgggccatcttctctgtgggccctgtgagccccagccgccgctggagctaccgctgctacggctatgacagccgggccccctacgtgtggagcctgcccagcgacctgctgggcctgctggtgcctggggtgtccaagaagcccagcctgtctgtgcagcccggccctgtggtggcccctggagagaagctgaccttccagtgtggcagtgatgctggctatgacagatttgtgctgtacaaggagtggggccgggacttcctgcagaggcctggccggcagccccaggccggcctgagccaggccaacttcaccctgggccctgtgagccgctcctatggaggccagtacacctgcagcggggcctacaacctgagcagcgagtggagcgcccccagcgaccccctggacatcctgatcaccggccagatccgggcccggcccttcctgtctgtgcggcccggccccaccgtggccagcggggagaatgtgaccctgctgtgccagagccagggcggcatgcacaccttcctgctgaccaaggagggcgctgctgacagccccctgcggctgaagagcaagaggcagagccacaagtaccaggccgagttccccatgagccctgtgaccagcgcccacgccggcacctaccgctgctacggcagcctgagcagcaacccctacctgctgacccaccccagcgaccccctggagctggtggtgtctggagctgctgagaccctgagccccccccagaacaagagtgacagcaaggccggggagtag

SEQ ID NO: 344669 - DNA, 1371 bp, Artificial Sequence
  derived and/or modified sequence
atgcaccggggcctcatccacccccagagcagcgctgtgggcggagatgccatgacccccatcctgactgtgctgatctgcctgggcctgagcctggaccccaggacccacgtgcaggccggccccctgcccaagcccaccctgtgggccgagcccggcagcgtcatcacccagggcagccctgtgaccctgcgctgccagggcagcctggagacccaggagtaccacctgtaccgggagaagaagacagccctgtggatcacccgcatcccccaggagctggtgaagaagggccagttccccatcctgagcatcacctgggagcacgccggccgctactgctgcatctacggcagccacacagctggcctgtctgagagcagtgaccccctggagctggtggtgactggagcctacagcaagcccaccctgagcgccctgcccagccctgtggtgaccagcggcggcaatgtgaccatccagtgtgacagccaggtggcctttgatggcttcatcctgtgcaaggagggggaggatgagcacccccagtgcctgaacagccacagccacgcccggggcagcagccgggccatcttctctgtgggccctgtgagccccagccgccgctggagctaccgctgctacggctatgacagccgggccccctacgtgtggagcctgcccagcgacctgctgggcctgctggtgcctggggtgtccaagaagcccagcctgtctgtgcagcccggccctgtggtggcccctggagagaagctgaccttccagtgtggcagtgatgctggctatgacagatttgtgctgtacaaggagtggggccgggacttcctgcagaggcctggccggcagccccaggccggcctgagccaggccaacttcaccctgggccctgtgagccgctcctatggaggccagtacacctgcagcggggcctacaacctgagcagcgagtggagcgcccccagcgaccccctggacatcctgatcaccggccagatccgggcccggcccttcctgtctgtgcggcccggccccaccgtggccagcggagaaaatgtgaccctgctgtgccagagccagggcggcatgcacaccttcctgctgaccaaggagggcgctgctgacagccccctgcggctgaagagcaagaggcagagccacaagtaccaggccgagttccccatgagccctgtgaccagcgcccatgctggcacctaccgctgctacggcagcctgagcagcaacccctacctgctgacccaccccagcgaccccctggagctggtggtgtctggagctgctgagaccctgagccccccccagaacaagagtgacagcaaggccggggagtag

SEQ ID NO: 344670 - DNA, 1880 bp, Artificial Sequence
  derived and/or modified sequence
gcctgatgtcagatgcgtctctgctgacctgagtctgccctgcaccatggacctgcattttccctgaagcatctccacgacggatgagatgactggccatgggctgagtctgagcttcaggacccatgtgcaggcagggattaaggtgcagagggacggccaaggatgcaatgggcaccgaggaggcaggaaagactcagagctcagcctgggctgcacagccaggtgtcaggtgcgtctctgctgatctgagtccaccctgcagcatggacctgcatcttccctgaaggatctccagggctggagggacgactgccatgcaccgagggctcatccatccacagagcagtgcagtgggaggagacgccatgacccccatcctcacggtcctgatctgtctcgggctgagcctggaccccaggacccacgtgcaggcagggcccctccccaagcccaccctctgggctgagccaggctctgtgatcacccaagggagtcctgtgaccctcaggtgtcaggggagcctggagacgcaggagtaccatctatatagagaaaagaaaacagcactctggattacacggatcccacaggagcttgtgaagaagggccagttccccatcctatccatcacctgggaacatgcagggcggtattgctgtatctatggcagccacactgcaggcctctcagagagcagtgaccccctggagctggtggtgacaggagcctacagcaaacccaccctctcagctctgcccagccctgtggtgacctcaggagggaatgtgaccatccagtgtgactcacaggtggcatttgatggcttcattctgtgtaaggaaggagaagatgaacacccacaatgcctgaactcccattcccatgcccgtgggtcatcccgggccatcttctccgtgggccccgtgagcccaagtcgcaggtggtcgtacaggtgctatggttatgactcgcgcgctccctatgtgtggtctctacccagtgatctcctggggctcctggtcccaggtgtttctaagaagccatcactctcagtgcagccgggtcctgtcgtggcccctggggagaagctgaccttccagtgtggctctgatgccggctacgacagatttgttctgtacaaggagtggggacgtgacttcctccagcgccctggccggcagccccaggctgggctctcccaggccaacttcaccctgggccctgtgagccgctcctacgggggccagtacacatgctccggtgcatacaacctctcctccgagtggtcggcccccagcgaccccctggacatcctgatcacaggacagatccgtgccagacccttcctctccgtgcggccgggccccacagtggcctcaggagagaacgtgaccctgctgtgtcagtcacagggagggatgcacactttccttttgaccaaggagggggcagctgattccccgctgcgtctaaaatcaaagcgccaatctcataagtaccaggctgaattccccatgagtcctgtgacctcggcccacgcggggacctacaggtgctacggctcactcagctccaacccctacctgctgactcaccccagtgaccccctggagctcgtggtctcaggagcagctgagaccctcagcccaccacaaaacaagtccgactccaaggctggtgagtgaggagatgcttgccgtgatgacgctgggcacagagggtcaggtcctgtcaagaggagctgggtgtcctgggtggacatttgaagaattatattcattccaacttgaagaattattcaacacctttaacaatgtatatgtgaagtactttattctttcatattttaaaaataaaagataattatccatgagaaa

SEQ ID NO: 344671 - DNA, 1320 bp, Artificial Sequence
  derived and/or modified sequence
atgacccccatcctgaccgtgctgatctgcctgggcctgagcctggatccacgaacacacgttcaagcaggtccactgcctaagcccaccctgtgggccgaaccgggttcagttatcactcaggggagcccagtgacactccgatgtcaggggtcactcgaaacccaggaataccatctgtatcgggagaaaaagaccgccctctggatcacccgaataccccaagaactcgtgaagaaggggcaattccccatcctcagcattacttgggaacatgctggcagatattgctgtatttatggatcccatacggcaggtctttcagaaagtagcgatcctttggaactcgtcgtcaccggcgcctactctaagccaaccctgagcgccctcccctcccccgtggtgacaagcggcgggaatgtaacaattcagtgcgattcccaggttgctttcgatggattcatactgtgcaaagaaggtgaggacgaacaccctcagtgcctgaattcccactcacacgcacggggcagctcccgagccattttttctgtgggtccggttagccctagcagaagatggtcctatcggtgttacggctatgacagccgggccccttacgtgtggtccctgccctccgacttgctgggcctgcttgtgcccggggtctcaaagaagccttcactgtcagtgcagcccggaccagtggtggccccaggagaaaagctcacattccagtgtggctccgatgctggatacgaccggttcgtactctataaggagtggggccgggattttttacaaaggccgggcaggcagcctcaggctggtttgtctcaggccaacttcacgttggggccagttagtcgaagctacggcgggcagtacacgtgctctggtgcctataacctgagctctgagtggtccgctccgtcagatcctctcgatatactaattacagggcaaattcgcgctagacccttcctgtctgttcggccgggacctactgtggcctcgggtgagaatgtcacactgctctgccaatcccaaggaggcatgcatacgttcctgttaaccaaagagggtgccgccgattcaccactgcgcttgaaatcgaagcggcagagccataagtatcaggctgagttccctatgagccctgtcacttcggctcacgcagggacataccggtgctacggatcactgtcctccaacccctatctgctgacgcatccgagcgaccctctcgagctcgtcgtgtcaggggcagccgaaacactgagcccaccccaaaacaagtccgactccaaagccggcgaatag

SEQ ID NO: 344672 - DNA, 1371 bp, Artificial Sequence
  derived and/or modified sequence
atgcaccggggcctgatccacccccagagcagcgccgtgggcggcgacgccatgaccccaatcttaacagtattgatttgcctcgggttatcactggaccctcggacccacgtgcaggcagggccattgcccaaaccaacactgtgggcagagcctgggtcagttatcacccaggggagccctgtgacactgcgatgtcaggggagcctcgagacacaggagtatcacttgtatcgggagaaaaaaacagcactctggattactagaatcccccaggagctggtaaaaaaaggtcagttcccaattctgagtatcacctgggagcatgccggccggtattgttgcatatatgggtcacacaccgccggtctgtcggagagttcagacccactggaactcgtggtgacaggtgcctattccaaacctacactgagcgccctgccaagtccagtggtgacgtctggcggcaatgtcaccatacaatgtgactcacaagtggcattcgatggctttatactatgcaaagagggcgaggacgagcacccacagtgtcttaattcccatagccacgccaggggaagttcaagggctattttcagtgttggtccagtgagcccgtcccggcgttggtcatatagatgctacgggtacgattcccgtgcaccatacgtgtggtccctgcccagtgaccttttgggattgctggtaccaggagtttccaaaaagcctagtttaagcgtccaaccaggacccgtcgttgcacccggagaaaaactgacatttcaatgtgggtccgatgccggctatgacaggtttgtactgtacaaggaatggggcagggacttcttgcagagacctggccgccaaccccaggctgggttatcacaggcaaactttaccctgggccccgtgtcgcggtcatatggcggtcaatacacctgctccggcgcctataatctgagctctgaatggagcgcaccttcggaccctctggatatactgatcactgggcagatacgtgcccgcccgttcctgtccgtacgaccaggcccgacggtagccagtggggagaatgttactcttttgtgtcagtctcaagggggtatgcatacgttccttctcactaaggaaggagccgccgacagtccgttgcgcctgaaaagtaaaaggcaatctcacaaatatcaggcggagtttccaatgtcacctgtgacatccgcccatgccggtacatatcgttgttacgggtcgctttctagcaatccctatctcctcactcacccctcggatccactggagcttgtcgtctctggcgctgccgagacgctgtcaccaccgcagaataaaagcgattctaaggccggagagtag

SEQ ID NO: 344673 - DNA, 1320 bp, Artificial Sequence
  derived and/or modified sequence
atgacgcctatcttaaccgtgctcatttgtctgggactatccctcgacccacggacacacgtgcaagccggtcccttgccaaaaccaaccctctgggcagagcctggctctgtgatcacacagggttctcccgttacactgcgatgccagggttcgctggagacccaggagtatcacttgtatcgcgagaagaagactgccctgtggatcacccgcatccctcaagagcttgtgaaaaagggtcaatttcctatccttagcattacctgggagcacgcagggaggtactgctgcatctacggaagccatacagcgggactgtccgagtccagcgacccgctggaacttgtggtgaccggcgcttatagcaaaccaacactcagcgcactgccttcccctgtagtcaccagcggcggaaatgtaactattcagtgcgatagccaggttgctttcgacggttttatcctttgtaaagaaggcgaggatgagcaccctcaatgccttaattctcacagccacgcgcgaggcagctctcgtgcgattttctcggtgggccctgttagcccctctcgtaggtggtcctaccggtgctacggctacgactcccgagcgccatacgtgtggtcacttccatctgacctactaggcctgctggtgcctggcgtctcgaaaaaaccgagcctttccgtgcagcccggtcccgtggttgctcccggagagaaattaacttttcagtgcggctctgacgccggatatgacaggttcgtactatataaagaatggggtagagattttctgcaacggcctggacggcaaccgcaggccggtctgtcccaggctaactttacactggggccagtgagccgtagctacggcggacagtacacctgttctggcgcatacaacctgtcgagtgaatggtctgcacccagcgatccactcgacatcctgattactggccagattagagccagaccttttctcagtgtgcgtcccggaccaaccgtcgccagtggtgaaaacgtgacactcttatgtcagagtcaagggggtatgcacacgtttttgctcaccaaagaaggcgcagcggattctcctctcagattgaaaagcaagagacagagtcataaataccaagccgagttccctatgtctcccgttacttccgcacacgccggaacctataggtgttatggctccctgtcatccaacccctacctgctaactcacccatccgaccctctggaactggttgtcagcggagccgctgagacgttgtcacctcctcagaataagagcgattctaaggccggtgagtag

SEQ ID NO: 344674 - DNA, 1371 bp, Artificial Sequence
  derived and/or modified sequence
atgcatcgcggactgattcatccccagagttcagcagttggcggtgatgccatgactcctatactcacagtgttgatttgcctggggctgagcctggacccaagaactcatgtgcaggcagggccactcccaaaaccgaccctgtgggctgaacccggaagtgtgattacccaggggtctcccgtgacattacggtgccaaggtagtctggagactcaagagtatcacctctaccgcgagaaaaagaccgccctttggattacacggataccccaggaactagtgaaaaaggggcagtttcccatcctctcaattacctgggagcacgccggaaggtactgctgcatttacggtagccatacagctggactgtccgaatcttcagacccccttgaacttgtggtcacaggagcttatagcaagcctaccttgtcggctctgccgtctccagtggttactagcggcggtaacgtgaccatccaatgtgacagccaggttgcattcgacggattcatcctgtgtaaagagggtgaggatgagcacccccaatgccttaacagtcacagtcatgcgcgaggatcctcaagagccatattctctgtagggcctgtgtcaccctctcgcagatggtcataccgctgctatggctacgactctcgggcaccctacgtttggagtctcccttctgacttgcttggtctgcttgtgccaggagtgtccaaaaaaccttccctttcggtgcaaccaggcccagttgtggcaccaggagagaaactgacattccagtgcggctcggacgctggctacgataggttcgttctgtacaaggaatggggaagagacttccttcagcggccaggcaggcagccccaggctgggctgagccaggccaatttcacactggggcctgtgagcaggtcatacgggggtcagtatacatgttcaggggcatataatctaagttccgaatggagcgcccctagtgatccgctagatattctgattactggtcaaataagagcacgaccttttctgagcgtcagaccaggccctacagtcgcttcgggtgagaatgtgacgctcctgtgccaatcccaaggtgggatgcatacttttctgctaactaaagaaggggcagctgattctcctctacggctgaaaagcaagcggcagtcgcataaataccaggccgaattccccatgtcacccgttacatctgctcacgctgggacctaccggtgttacggcagtttaagtagcaacccttacctgctaacccacccctctgatccacttgagcttgtggtctccggagccgctgagacactttctccaccgcagaacaaatccgactccaaggcgggagagtag

SEQ ID NO: 344675 - DNA, 1320 bp, Artificial Sequence
  derived and/or modified sequence
atgacccctattttgaccgttttgatttgcctcggtctgtctctcgatcccaggacacacgtgcaggcgggcccacttcccaaacccacgctatgggcggaacccggctccgtgatcacccagggctcacccgtcacacttcgctgtcagggttctttagagacacaggagtaccacctttacagagaaaaaaaaaccgcactgtggatcactcgaatccctcaggaattagtcaagaaaggccagtttcccatactcagcatcacctgggaacatgccgggcggtactgctgcatttatggaagccacaccgccggactgagcgagagcagcgacccactcgaattggtagtgaccggagcctattctaaacctactctttcagccttgccaagtccagttgtaacctcaggaggcaatgtcacaatccagtgcgattcccaagtggccttcgacggctttattttgtgcaaagagggagaggatgagcacccccagtgcttgaactcccattcccacgctcgaggcagtagccgagccattttcagcgtcggtccagtgtctccttctcggcggtggtcctatcgatgttacggctacgattcccgggccccatacgtctggtccctacctagcgatctgctgggcctgttggtccccggtgtctctaaaaagcctagcctctctgtccagcccgggccagtggttgcccccggagagaagttgacatttcagtgtggttccgacgcgggatacgaccgttttgtgttgtataaggaatggggacgtgacttccttcagcgccccggccggcagcctcaggctggactgagtcaggccaattttaccctgggccccgtgagtcgatcctacgggggccagtatacctgtagcggagcctataatctctcgtcggagtggtctgcccctagcgatccattggatatactaattaccggccagattagagcacgcccttttctatccgtcagacccggccccacagtggctagtggagaaaatgtaactttactatgccagtcacagggaggaatgcatacttttctgctgactaaggagggggcggccgatagccctctgagactcaagtccaaacgccagagccacaagtaccaggccgaatttcccatgagcccagtgacatccgcccacgcggggacctacagatgttatggctccttatctagcaatccctatctccttacgcatccctctgacccactcgagctggtcgtctcaggggccgccgagactcttagcccaccccagaacaaatcggattcaaaagcaggcgaatag

SEQ ID NO: 344676 - DNA, 1371 bp, Artificial Sequence
  derived and/or modified sequence
atgcaccgcgggctgattcacccacaatcaagtgccgtaggcggggatgctatgaccccaatactgaccgtcctcatctgccttggactgtccctcgacccaagaacacatgttcaggcggggcccttaccaaaacccacgctctgggccgagcctggctctgtaatcacacagggctcacccgtgaccctacggtgtcaaggaagtttagaaacccaggaataccacctgtaccgcgaaaaaaaaactgctctctggatcacgcgaataccacaggaattggtgaaaaagggacagtttcctattctgagcatcacatgggagcatgctggaagatattgttgcatctacggcagtcacacagcggggctttcggaatcctcagatcccctggagctggtggtgacaggtgcctattcaaaaccaacactcagcgccttgccatcacccgtggtcacctcaggaggtaatgtcacgattcaatgtgacagtcaagtcgcctttgacggcttcatcctctgtaaggagggagaagatgagcatcctcaatgtctgaatagccacagtcatgccagaggctcctctcgggcaatcttcagcgttggccccgtgagtcccagccggaggtggagttacagatgctacggttacgactcaagggcaccatatgtctggagtctcccatctgatcttttaggactgctagtccctggcgtctctaagaaaccatcgctttccgtccagcccggacccgtcgtggcaccaggcgagaagctgacatttcagtgcgggtccgacgcgggttatgatcgatttgtgttgtataaagaatgggggcgcgacttcctccagcgcccaggaaggcaaccccaagccggtctatcccaagcaaatttcacccttggcccagtgtcccgctcctatggagggcagtacacttgttccggtgcctacaacctatctagcgagtggtcggctccttctgacccactagacatactgattaccgggcagatacgcgcccgccccttcctgtcggttcggccggggcctacagtggcttccggtgaaaacgttacactcctctgccaaagtcagggggggatgcacacctttttgttaaccaaggaaggcgcagccgactcaccactgagattgaagtcaaaaaggcagtcacataaatatcaagcggagttccctatgtcacctgtaacatctgctcatgcgggcacgtatagatgttacggcagcctgtcgtccaacccttatctgttgacccatccatcagatcccctggaactggttgttagcggagccgccgagactctgtctccgccccagaacaagtccgactcaaaggccggtgagtag

SEQ ID NO: 344677 - DNA, 1320 bp, Artificial Sequence
  derived and/or modified sequence
atgactcctattctgacagtgctgatatgtctcggactatcacttgacccccgaacccacgtccaagcaggccccttgccaaagccaacattgtgggcagaacctggatcagtgataactcaaggatctccggtgacattgagatgccaagggtccctagagacacaagaatatcacctgtatcgggagaaaaaaaccgcgctttggattacccgaatccctcaagagctggtcaaaaaggggcagtttccgattctgagcatcacatgggaacatgccgggagatactgttgcatttacggctctcacacagctgggctcagtgaaagctctgacccactggaactcgtagtgacaggcgcatattcaaagcccaccctgtcagccctcccttccccagtagtgacctccggcggcaacgtgaccatccagtgtgactctcaagtggcctttgacgggtttattctctgtaaagaaggtgaggatgagcacccccagtgccttaatagccactcccacgctagaggcagctccagggcgatcttttctgtagggcccgtgtcaccaagtagaaggtggtcatatcggtgctatggctacgacagccgcgcaccttacgtttggtccctccccagcgatctgctaggactcttggtgccgggcgtttccaagaagccatccctatcagtgcaacccggacctgtggtcgcccctggagaaaagcttacgtttcagtgcgggagtgacgccggatacgatagattcgtcctttataaagagtggggaagggactttctgcagcgacctgggcgtcagccacaggctggcctgtcacaggcaaactttacattaggtcccgtcagtcgatcctatggtgggcagtatacatgctctggtgcttataacctgagctcagaatggtcagccccctctgaccccttggatattttgataaccggacagatccgcgcgcgcccctttctttccgtaagaccgggcccaacagtagccagtggcgaaaatgtgaccttgctgtgtcagagtcagggcgggatgcacaccttcttgttaacaaaggagggagcggccgatagccccctccgtcttaaatcaaagcgacaatctcacaagtaccaggcagaatttcccatgtcacctgttacaagcgctcatgctgggacctaccgctgttatgggtctctcagctcgaatccttacttgttaacccacccatctgacccactggaactcgtagtgtccggcgccgctgaaactctaagtcccccccagaacaaatcagatagcaaagctggagaatag

SEQ ID NO: 344678 - DNA, 1371 bp, Artificial Sequence
  derived and/or modified sequence
atgcaccgaggattaatccaccctcaatcaagcgcagtcggcggagatgcgatgacacccattctcacagtccttatttgtctgggcctgtcactggacccccgcacacatgtgcaagccgggcctctgccgaaacctactctgtgggccgagccaggatctgtcatcacacagggctcccccgtgaccctaaggtgccaaggctccctggagacgcaggaatatcacctttatagagagaagaagaccgctttgtggatcacgcgaatcccccaggaacttgtcaagaaaggccagttcccgattttgtccatcacttgggaacacgccggccgctactgttgcatctatggatcacacaccgcaggcctctccgaatcttccgacccccttgaacttgtggtcactggggcatactcaaaaccaaccctgtccgctttaccgtcacccgtggtaacatcaggaggcaacgtcaccatccaatgcgactcacaggtggctttcgacggcttcatcttgtgcaaagaaggggaagacgaacaccctcaatgtctgaattcacactcacacgcacgcggtagcagccgagccatttttagcgtgggccccgtgtcacctagccgccgatggagttatcgctgctatggctacgattcccgggcaccatatgtctggtccttgccttccgatctacttggtctcctggtccccggtgtcagtaaaaagccgagtttatctgtccagccaggtccagtcgtggcaccgggtgagaaattgaccttccagtgcggttccgatgcgggctatgacagatttgtgttatataaagaatggggaagggatttcctgcaaagaccaggcagacagccacaggccgggctttctcaggccaatttcactcttggaccagtgtcaaggagctacggggggcaatatacatgtagcggagcttacaatctcagcagcgaatggagtgctccctctgaccctcttgatatactgatcacggggcagatccgggctagacccttcctcagcgtgcggccaggtcccacagtggctagcggcgagaatgtgacccttctgtgtcaaagtcagggcggcatgcatacctttctcctcacaaaggaaggagccgctgactcacctcttaggctcaagtcaaaaagacagtcacacaagtaccaggcagaatttcccatgagccctgtgacctctgcacacgctggaacataccgctgctatggctcactgagttccaacccctacctcctcactcacccctccgaccctttagagctcgtcgtcagtggcgctgccgagaccctttcccccccccaaaacaaatcagatagcaaggcaggtgaatag

SEQ ID NO: 344679 - DNA, 1320 bp, Artificial Sequence
  derived and/or modified sequence
atgacccccatcctgaccgtgctgatctgcctgggcctgagcctggaccccagaacccacgtgcaggccggccccctgcccaagcccaccctgtgggccgagcccggcagcgtgatcacccagggcagccccgtgaccctgagatgccagggcagcctggagacccaggagtaccacctgtacagagagaagaagaccgccctgtggatcaccagaatcccccaggagctggtgaagaagggccagttccccatcctgagcatcacctgggagcacgccggcagatactgctgcatctacggcagccacaccgccggcctgagcgagagcagcgaccccctggagctggtggtgaccggcgcctacagcaagcccaccctgagcgccctgcccagccccgtggtgaccagcggcggcaacgtgaccatccagtgcgacagccaggtggccttcgacggcttcatcctgtgcaaggagggcgaggacgagcacccccagtgcctgaacagccacagccacgccagaggcagcagcagagccatcttcagcgtgggccccgtgagccccagcagaagatggagctacagatgctacggctacgacagcagagccccctacgtgtggagcctgcccagcgacctgctgggcctgctggtgcccggcgtgagcaagaagcccagcctgagcgtgcagcccggccccgtggtggcccccggcgagaagctgaccttccagtgcggcagcgacgccggctacgacagattcgtgctgtacaaggagtggggcagagacttcctgcagagacccggcagacagccccaggccggcctgagccaggccaacttcaccctgggccccgtgagcagaagctacggcggccagtacacctgcagcggcgcctacaacctgagcagcgagtggagcgcccccagcgaccccctggacatcctgatcaccggccagatcagagccagacccttcctgagcgtgagacccggccccaccgtggccagcggcgagaacgtgaccctgctgtgccagagccagggcggcatgcacaccttcctgctgaccaaggagggcgccgccgacagccccctgagactgaagagcaagagacagagccacaagtaccaggccgagttccccatgagccccgtgaccagcgcccacgccggcacctacagatgctacggcagcctgagcagcaacccctacctgctgacccaccccagcgaccccctggagctggtggtgagcggcgccgccgagaccctgagccccccccagaacaagagcgacagcaaggccggcgagtag

SEQ ID NO: 344680 - DNA, 1371 bp, Artificial Sequence
  derived and/or modified sequence
atgcacagaggcctgatccacccccagagcagcgccgtgggcggcgacgccatgacccccatcctgaccgtgctgatctgcctgggcctgagcctggaccccagaacccacgtgcaggccggccccctgcccaagcccaccctgtgggccgagcccggcagcgtgatcacccagggcagccccgtgaccctgagatgccagggcagcctggagacccaggagtaccacctgtacagagagaagaagaccgccctgtggatcaccagaatcccccaggagctggtgaagaagggccagttccccatcctgagcatcacctgggagcacgccggcagatactgctgcatctacggcagccacaccgccggcctgagcgagagcagcgaccccctggagctggtggtgaccggcgcctacagcaagcccaccctgagcgccctgcccagccccgtggtgaccagcggcggcaacgtgaccatccagtgcgacagccaggtggccttcgacggcttcatcctgtgcaaggagggcgaggacgagcacccccagtgcctgaacagccacagccacgccagaggcagcagcagagccatcttcagcgtgggccccgtgagccccagcagaagatggagctacagatgctacggctacgacagcagagccccctacgtgtggagcctgcccagcgacctgctgggcctgctggtgcccggcgtgagcaagaagcccagcctgagcgtgcagcccggccccgtggtggcccccggcgagaagctgaccttccagtgcggcagcgacgccggctacgacagattcgtgctgtacaaggagtggggcagagacttcctgcagagacccggcagacagccccaggccggcctgagccaggccaacttcaccctgggccccgtgagcagaagctacggcggccagtacacctgcagcggcgcctacaacctgagcagcgagtggagcgcccccagcgaccccctggacatcctgatcaccggccagatcagagccagacccttcctgagcgtgagacccggccccaccgtggccagcggcgagaacgtgaccctgctgtgccagagccagggcggcatgcacaccttcctgctgaccaaggagggcgccgccgacagccccctgagactgaagagcaagagacagagccacaagtaccaggccgagttccccatgagccccgtgaccagcgcccacgccggcacctacagatgctacggcagcctgagcagcaacccctacctgctgacccaccccagcgaccccctggagctggtggtgagcggcgccgccgagaccctgagccccccccagaacaagagcgacagcaaggccggcgagtag

SEQ ID NO: 344681 - protein, 286 aa, Artificial Sequence
  derived and/or modified sequence
MALVLILQLLTLWPLCHTDITPSVAIIVPPASYHPKPWLGAQPATVVTPGVNVTLRCRAPQPAWRFGLFKPGEIAPLLFRDVSSELAEFFLEEVTPAQGGIYRCCYRRPDWGPGVWSQPSDVLELLVTEELPRPSLVALPGPVVGPGANVSLRCAGRLRNMSFVLYREGVAAPLQYRHSAQPWADFTLLGARAPGTYSCYYHTPSAPYVLSQRSEVLVISWEGEGPEARPASSAPGMQAPGPPPSDPGAQAPSLSSFRPRGLVLQPLLPQTQDSWDPAPPPSDPGV

SEQ ID NO: 344682 - DNA, 861 bp, Artificial Sequence
  derived and/or modified sequence
atggcgcttgtactcatcctgcagctcctaactctgtggccgttgtgccataccgatatcaccccgtcagtcgctattatcgtgcccccagcctcttaccaccctaagccttggttaggggcccagcccgccaccgtggtcactccaggtgtaaatgtgactctgcggtgccgagcccctcagcctgcatggagatttggcctgttcaagcctggagagattgcacccctgctcttccgcgatgtgagcagcgaactcgccgagttttttctggaagaagtgacaccggcccagggagggatttaccgatgctgttatcgtaggccggattggggacctggagtctggagtcagccatctgacgtcctggagctgctggtcacagaggagctcccgaggccaagcctggtggcactgccagggccagtggtgggcccgggagccaatgtctcgctgcgatgcgccggcaggctccgcaacatgtccttcgtgttgtacagggaaggagtagcggcccctttgcagtacaggcatagtgcccagccatgggcagattttacactgttgggcgcacgcgcgccaggcacatacagctgttactaccatactccatccgccccatatgtgctgtctcagagatctgaggtgttagtcatttcatgggagggggaaggacccgaagccagacctgcaagttctgcccccggaatgcaggccccagggccccctccatccgatcctggagctcaagctcccagcctgtcgtcattcaggccgcggggtctcgtgcttcagcctctgctgccacagactcaggactcctgggatcccgctcccccgccttccgaccccggcgtctag

SEQ ID NO: 344683 - DNA, 861 bp, Artificial Sequence
  derived and/or modified sequence
atggccctggtgctgatcctgcagctgctgaccctgtggcccctgtgccacacagacatcaccccatctgtggccatcatcgtgcccccagccagctaccaccccaagccctggctgggcgcccagcctgccaccgtggtgaccccaggagtgaatgtgaccctgcgctgccgggccccccagcctgcctggaggtttggcctcttcaagccaggagagatcgcccccctgctcttcagagatgtgagcagcgagctggccgagttcttcctggaggaggtgaccccagcccagggcggcatctaccgctgctgctacagaagaccagactggggccctggggtgtggagccagcccagtgatgtgctggagctgctggtgacagaggagctgccccggcccagcctggtggccctgcccggccctgtggtgggccctggggccaacgtgtccctgcgctgtgccggccgcctgaggaacatgagctttgtgctgtaccgggagggcgtggccgcccccctgcagtaccgccacagcgcccagccctgggccgacttcaccctgctgggcgcccgggcccctggcacctacagctgctactaccacaccccatctgccccctacgtgctgagccagaggtctgaggtgctggtgatctcctgggagggggagggccctgaggcccggcctgccagcagcgcccctggcatgcaggcccctggccccccacccagcgaccccggggcccaggcccccagcctgagcagcttccggccccggggcctggtgctgcagcccctgctgccccagacccaggacagctgggaccctgcccccccacccagcgaccccggggtgtag

SEQ ID NO: 344684 - DNA, 861 bp, Artificial Sequence
  derived and/or modified sequence
atggccctggtgctgatcctgcagctgctgaccctgtggcccctgtgccacacagacataacgccatccgttgctatcatcgtgccgccggctagctaccatcccaagccatggttaggcgcccagccagccacggtcgtgactccaggcgtgaacgtcacactgcgatgccgggctccccaacctgcctggcgttttggactgtttaagcccggagagatcgcgccgctccttttcagggatgtgagtagcgaacttgccgagttctttctggaggaagtgaccccagctcaaggcggaatttacaggtgctgctatagacggcccgactggggtccaggagtttggagccaaccatctgacgtcctggagctcttagtgaccgaggagttaccgcgccccagccttgtggcgcttcccgggccagtggtgggccccggggcaaatgtgtcgttaaggtgtgccggtcgactgcggaacatgagctttgtgttgtatagagaaggggtcgcggcccccttacagtaccgccattccgcacagccatgggcagatttcacactgctgggggctcgggcacctggcacgtactcatgttattatcacacccccagcgccccttatgttctttctcagaggtccgaagtcctggtaatatcatgggaaggcgagggcccagaggctagaccagcttcgagcgctcctggaatgcaggccccgggccccccccctagcgatcccggggctcaagcaccaagcctgagctcattcagaccaagaggcctggtgctgcaacccctgttgccgcagacacaggactcctgggatcccgccccaccccccagcgatccgggtgtgtag

SEQ ID NO: 344685 - DNA, 1892 bp, Artificial Sequence
  derived and/or modified sequence
gctctagcgggtatctgcccaccatggccctggtgctgatcctccagctgctgaccctctggcctctgtgtcacacagacatcactccgtctgtggccattatagtccccccagcttcataccaccctaagccatggctgggagctcagccggctacagttgtgacccctggggtcaacgtgaccttgagatgccgggcaccccaacccgcttggagatttggacttttcaagcctggagagatcgctccccttctcttccgggatgtgtcctccgagctggcagaattctttctggaggaggtgactccagcccaagggggaatttaccgctgctgctaccgaaggccagactgggggccgggtgtctggtcccagcccagcgatgtcctggagctgctggtgacagaggagctgccgcggccgtcgctggtggcgctgcccgggccggtggtgggtcctggcgccaacgtgagcctgcgctgcgcgggccgcctgcggaacatgagcttcgtgctgtaccgcgagggcgtggcggccccgctgcagtaccgccactccgcgcagccctgggccgacttcacgctgctgggcgcccgcgcccccggcacctacagctgctactatcacacgccctccgcgccctacgtgctgtcgcagcgcagcgaggtgctggtcatcagctgggaaggtgagggccctgaggcccggcccgcctcctccgccccaggaatgcaggccccaggacctccgccctcagacccaggagcccaggcccccagcctctcctccttcagacccaggggtctagtcctgcagcccctcctccctcagacccaggattcctgggacccagcccctcctccctcagatccaggagtctagtcctccagctcctcctccctcagacccaggattcccgggccccagtacctcctccctcagacccaggactccaggcccccagcccctccttcctggacccaggactccaggcccccagcccctccttcctgatccagcagtccaggccccagccccttcttcctggacccaggagttgaagcctccatcgactccccctcaactttgagactgtagagtcaggtccctaagtccaccccaggggctggaaacctggagttcagggcccagactttggggtccgggagctgatggcccctctctcccggctccgcccgcagactctggctcctccgactacacccgggggaacctagtccgcctggggctggccgggctggtcctcatctccctgggcgcgctggtcacttttgactggcgcagtcagaaccgcgctcctgctggtatccgcccctgagccccaggagcactgcagcccgagacttccaacctgagtggcggagaagctgggaccctgggctggactgtcctttcctgcagccccacagtcctgctggctgagctccgcggaacggtccttagaccccgctgtgccctgtgctgtagcttctttccaggcctttcccaaggagtagctgaaaggaagacgcgattagtggttaagacttccaagccagaagacagagggttcgaatcccagcactgccgtctactcactgtagtagtagcagctacagaaaggtagtagtgagacgtgaagccagctggacttcctgggttgaatggggacctggagaacttttctgtcttacaagaggattgtaaaatggaccaatcagcactctgtaagatggaccaatcagcgctctgtaaaatggaccaatcagcaggacatgggcggggacaataagggaataaaagctggcgagcgcggcaccccaccagagtctgcttccacgctgtgggagctttgttctcttgctctacacaataaatcttgctgctgct

SEQ ID NO: 344686 - DNA, 2055 bp, Artificial Sequence
  derived and/or modified sequence
gcgtgcgcactcgcgcagaacaaagatggagccgtggagtgccatagggctatgacacagtcacccacaggcccccacctcgatactctcttccgtaaatgaggatctgggtctggttttctgatgttgcctcatttcctgggaggggagagggtgcgaccaagccctggctccagctctagcgggtatctgcccaccatggccctggtgctgatcctccagctgctgaccctctggcctctgtgtcacacagacatcactccgtctgtccccccagcttcataccaccctaagccatggctgggagctcagccggctacagttgtgacccctggggtcaacgtgaccttgagatgccgggcaccccaacccgcttggagatttggacttttcaagcctggagagatcgctccccttctcttccgggatgtgtcctccgagctggcagaattctttctggaggaggtgactccagcccaagggggaatttaccgctgctgctaccgaaggccagactgggggccgggtgtctggtcccagcccagcgatgtcctggagctgctggtgacagaggagctgccgcggccgtcgctggtggcgctgcccgggccggtggtgggtcctggcgccaacgtgagcctgcgctgcgcgggccgcctgcggaacatgagcttcgtgctgtaccgcgagggcgtggcggccccgctgcagtaccgccactccgcgcagccctgggccgacttcacgctgctgggcgcccgcgcccccggcacctacagctgctactatcacacgccctccgcgccctacgtgctgtcgcagcgcagcgaggtgctggtcatcagctgggaaggtgagggccctgaggcccggcccgcctcctccgccccaggaatgcaggccccaggacctccgccctcagacccaggagcccaggcccccagcctctcctccttcagacccaggggtctagtcctgcagcccctcctccctcagacccaggattcctgggacccagcccctcctccctcagatccaggagtctagtcctccagctcctcctccctcagacccaggattcccgggccccagtacctcctccctcagacccaggactccaggcccccagcccctccttcctggacccaggactccaggcccccagcccctccttcctgatccagcagtccaggccccagccccttcttcctggacccaggagttgaagcctccatcgactccccctcaactttgagactgtagagtcaggtccctaagtccaccccaggggctggaaacctggagttcagggcccagactttggggtccgggagctgatggcccctctctcccggctccgcccgcagactctggctcctccgactacacccgggggaacctagtccgcctggggctggccgggctggtcctcatctccctgggcgcgctggtcacttttgactggcgcagtcagaaccgcgctcctgctggtatccgcccctgagccccaggagcactgcagcccgagacttccaacctgagtggcggagaagctgggaccctgggctggactgtcctttcctgcagccccacagtcctgctggctgagctccgcggaacggtccttagaccccgctgtgccctgtgctgtagcttctttccaggcctttcccaaggagtagctgaaaggaagacgcgattagtggttaagacttccaagccagaagacagagggttcgaatcccagcactgccgtctactcactgtagtagtagcagctacagaaaggtagtagtgagacgtgaagccagctggacttcctgggttgaatggggacctggagaacttttctgtcttacaagaggattgtaaaatggaccaatcagcactctgtaagatggaccaatcagcgctctgtaaaatggaccaatcagcaggacatgggcggggacaataagggaataaaagctggcgagcgcggcaccccaccagagtctgcttccacgctgtgggagctttgttctcttgctctacacaataaatcttgctgctgct

SEQ ID NO: 344687 - DNA, 861 bp, Artificial Sequence
  derived and/or modified sequence
atggccctggtactgattctgcagctgctgaccctctggcctctatgccatactgacattactccatccgttgccatcatcgtcccccctgcaagttatcaccctaaaccttggctcggcgctcagccagctacagtggtgacaccaggagtcaacgttactctaaggtgcagggcaccacagccggcatggcgattcggtctgtttaaaccgggagagatcgcgccactcttatttagggatgtgagctcagaactcgctgagttcttcctggaagaggtcaccccagcacagggtggcatctatcgttgctgctatcggcgtccagactggggaccaggggtgtggagccagccctcagatgtcttagaattactcgtgactgaggagctcccacggccttctctagtggccctgcctgggcctgttgttggaccaggagctaatgttagcctgaggtgcgctggtcgcctgcgtaacatgagcttcgtcttatatagggaaggcgtcgccgctcccttacagtatagacatagtgcacagccttgggccgattttaccctgctgggggctagggctccagggacttattcatgctactatcacacccctagtgccccttacgtgctgtctcagagatcagaggttctggttatcagttgggaaggcgagggcccagaagcccgacccgcttccagcgctcccggtatgcaggcgccaggccctcccccaagcgaccccggagcccaggctccgtcccttagctcattccgtccaagaggactggtccttcagcctctcttaccccagactcaagattcttgggatcccgcaccccctccatccgaccccggtgtgtag

SEQ ID NO: 344688 - DNA, 861 bp, Artificial Sequence
  derived and/or modified sequence
atggccctggtgctgatcctgcagctgctgaccctgtggcccctgtgccacaccgacatcacccccagcgtggccatcatcgtgccccccgccagctaccaccccaagccctggctgggcgcccagcccgccaccgtggtgacccccggcgtgaacgtgaccctgagatgcagagccccccagcccgcctggagattcggcctgttcaagcccggcgagatcgcccccctgctgttcagagacgtgagcagcgagctggccgagttcttcctggaggaggtgacccccgcccagggcggcatctacagatgctgctacagaagacccgactggggccccggcgtgtggagccagcccagcgacgtgctggagctgctggtgaccgaggagctgcccagacccagcctggtggccctgcccggccccgtggtgggccccggcgccaacgtgagcctgagatgcgccggcagactgagaaacatgagcttcgtgctgtacagagagggcgtggccgcccccctgcagtacagacacagcgcccagccctgggccgacttcaccctgctgggcgccagagcccccggcacctacagctgctactaccacacccccagcgccccctacgtgctgagccagagaagcgaggtgctggtgatcagctgggagggcgagggccccgaggccagacccgccagcagcgcccccggcatgcaggcccccggccccccccccagcgaccccggcgcccaggcccccagcctgagcagcttcagacccagaggcctggtgctgcagcccctgctgccccagacccaggacagctgggaccccgcccccccccccagcgaccccggcgtgtag

SEQ ID NO: 344689 - protein, 267 aa, Artificial Sequence
  derived and/or modified sequence
MALVLILQLLTLWPLCHTDITPSVAIIVPPASYHPKPWLGAQPATVVTPGVNVTLRCRAPQPAWRFGLFKPGEIAPLLFRDVSSELAEFFLEEVTPAQGGIYRCCYRRPDWGPGVWSQPSDVLELLVTEELPRPSLVALPGPVVGPGANVSLRCAGRLRNMSFVLYREGVAAPLQYRHSAQPWADFTLLGARAPGTYSCYYHTPSAPYVLSQRSEVLVISWEDSGSSDYTRGNLVRLGLAGLVLISLGALVTFDWRSQNRAPAGIRP

SEQ ID NO: 344690 - DNA, 804 bp, Artificial Sequence
  derived and/or modified sequence
atggccttggtgctcatcttacagctcttgacattgtggcctctttgccacactgacattaccccaagtgtggcaataatcgtgcctccagcatcttaccaccccaagccctggctgggtgcccagcctgccacggtagtgactccgggcgtcaatgttaccctgaggtgtcgcgcccctcagcccgcttggcgcttcgggctgttcaaacctggggagattgctcctctcctcttcagagatgtttccagtgaattggcagagttctttctggaggaggtgacccccgcccagggtgggatttacaggtgctgttacaggcggccggactggggtccaggcgtgtggtcgcagccaagtgacgttctggaactattggtgacagaggagctgccccggccttcgctggtggcccttcctgggccagtggttggccccggagcgaatgtttctctgcggtgtgccggcaggctgcgcaacatgagctttgtcctttatcgggaaggagttgctgcccctctgcagtacagacattctgcccagccatgggcggacttcacattattgggcgctcgcgctcctggaacttattcctgctattatcacaccccatcggccccctacgtgctgtctcagcggtccgaagtgttggtgatttcctgggaggactctgggtcctcagattacactaggggcaatctcgtcagactcgggctggccggattggtgctgataagcctcggagccctcgtgactttcgactggcgcagtcagaacagggctcctgccgggattcgtccatag

SEQ ID NO: 344691 - DNA, 804 bp, Artificial Sequence
  derived and/or modified sequence
atggccctggtgctgatcctgcagctgctgaccctgtggcccctgtgccacacagacatcaccccatctgtggccatcatcgtgcccccagccagctaccaccccaagccctggctgggcgcccagcctgccaccgtggtgaccccaggagtgaatgtgaccctgcgctgccgggccccccagcctgcctggaggtttggcctcttcaagccaggagagatcgcccccctgctcttcagagatgtgagcagcgagctggccgagttcttcctggaggaggtgaccccagcccagggcggcatctaccgctgctgctacagaagaccagactggggccctggggtgtggagccagcccagtgatgtgctggagctgctggtgacagaggagctgccccggcccagcctggtggccctgcccggccctgtggtgggccctggggccaacgtgtccctgcgctgtgccggccgcctgaggaacatgagctttgtgctgtaccgggagggcgtggccgcccccctgcagtaccgccacagcgcccagccctgggccgacttcaccctgctgggcgcccgggcccctggcacctacagctgctactaccacaccccatctgccccctacgtgctgagccagaggtctgaggtgctggtgatctcctgggaggacagcggcagcagtgactacacccggggcaacctggtgcggctgggcctggccggcctggtgctgatcagcctgggcgccctggtgacctttgactggaggagccagaacagagccccagctggcatccggccctag

SEQ ID NO: 344692 - DNA, 804 bp, Artificial Sequence
  derived and/or modified sequence
atggccctggtgctgatcctgcagctgctgaccctgtggcccctgtgccatacagatattaccccatccgttgccataattgtgccccctgcttcataccaccctaaaccgtggctcggcgctcaaccagcgaccgtggtcacaccgggggttaacgttaccttgagatgccgggccccccagcctgcctggcgatttggtctgttcaagccaggagagatagcaccccttttgttccgagacgtgtcctctgaactggccgagtttttcctggaggaagtgactcctgctcaggggggcatttataggtgctgctacaggaggcccgactgggggcctggggtttggtcacaaccatccgacgtgctggaactccttgttacagaggaactaccacgtcctagtctggtggctctgcctggaccggtggtgggtcccggggctaatgtgtccttaaggtgtgcaggccggttgagaaacatgtcattcgttctctatcgagagggggtggccgcacctcttcagtatcgacactctgcacagccctgggccgactttaccctgctaggcgccagagcccctggtacttatagttgctactatcacaccccctccgccccgtatgttcttagtcagcgaagtgaggttttagttattagctgggaagattccggctcctctgattacacccgaggaaatctcgtccgcctgggcctagcagggctcgtgcttatctctttgggtgcactggtgacttttgattggaggtcccagaaccgggcgccagccggtattcgcccatag

SEQ ID NO: 344693 - DNA, 1375 bp, Artificial Sequence
  derived and/or modified sequence
atttcctgggaggggagagggtgcgaccaagccctggctccagctctagcgggtatctgcccaccatggccctggtgctgatcctccagctgctgaccctcttccccccagcttcataccaccctaagccatggctgggagctcagccggctacagttgtgacccctggggtcaacgtgaccttgagatgccgggcaccccaacccgcttggagatttggacttttcaagcctggagagatcgctccccttctcttccgggatgtgtcctccgagctggcagaattctttctggaggaggtgactccagcccaagggggaatttaccgctgctgctaccgaaggccagactgggggccgggtgtctggtcccagcccagcgatgtcctggagctgctggtgacagaggagctgccgcggccgtcgctggtggcgctgcccgggccggtggtgggtcctggcgccaacgtgagcctgcgctgcgcgggccgcctgcggaacatgagcttcgtgctgtaccgcgagggcgtggcggccccgctgcagtaccgccactccgcgcagccctgggccgacttcacgctgctgggcgcccgcgcccccggcacctacagctgctactatcacacgccctccgcgccctacgtgctgtcgcagcgcagcgaggtgctggtcatcagctgggaagactctggctcctccgactacacccgggggaacctagtccgcctggggctggccgggctggtcctcatctccctgggcgcgctggtcacttttgactggcgcagtcagaaccgcgctcctgctggtatccgcccctgagccccaggagcactgcagcccgagacttccaacctgagtggcggagaagctgggaccctgggctggactgtcctttcctgcagccccacagtcctgctggctgagctccgcggaacggtccttagaccccgctgtgccctgtgctgtagcttctttccaggcctttcccaaggagtagctgaaaggaagacgcgattagtggttaagacttccaagccagaagacagagggttcgaatcccagcactgccgtctactcactgtagtagtagcagctacagaaaggtagtagtgagacgtgaagccagctggacttcctgggttgaatggggacctggagaacttttctgtcttacaagaggattgtaaaatggaccaatcagcactctgtaagatggaccaatcagcgctctgtaaaatggaccaatcagcaggacatgggcggggacaataagggaataaaagctggcgagcgcggcaccccaccagagtctgcttccacgctgtgggagctttgttctcttgctctacacaataaatcttgctgctgct

SEQ ID NO: 344694 - DNA, 1355 bp, Artificial Sequence
  derived and/or modified sequence
atggccctggtgctgatcctccagctgctgaccctctggcctctgtgtcacacagacatcactccgtctgtggccattatagtccccccagcttcataccaccctaagccatggctgggagctcagccggctacagttgtgacccctggggtcaacgtgaccttgagatgccgggcaccccaacccgcttggagatttggacttttcaagcctggagagatcgctccccttctcttccgggatgtgtcctccgagctggcagaattctttctggaggaggtgactccagcccaagggggaatttaccgctgctgctaccgaaggccagactgggggccgggtgtctggtcccagcccagcgatgtcctggagctgctggtgacagaggagctgccgcggccgtcgctggtggcgctgcccgggccggtggtgggtcctggcgccaacgtgagcctgcgctgcgcgggccgcctgcggaacatgagcttcgtgctgtaccgcgagggcgtggcggccccgctgcagtaccgccactccgcgcagccctgggccgacttcacgctgctgggcgcccgcgcccccggcacctacagctgctactatcacacgccctccgcgccctacgtgctgtcgcagcgcagcgaggtgctggtcatcagctgggaagactctggctcctccgactacacccgggggaacctagtccgcctggggctggccgggctggtcctcatctccctgggcgcgctggtcacttttgactggcgcagtcagaaccgcgctcctgctggtatccgcccctgagccccaggagcactgcagcccgagacttccaacctgagtggcggagaagctgggaccctgggctggactgtcctttcctgcagccccacagtcctgctggctgagctccgcggaacggtccttagaccccgctgtgccctgtgctgtagcttctttccaggcctttcccaaggagtagctgaaaggaagacgcgattagtggttaagacttccaagccagaagacagagggttcgaatcccagcactgccgtctactcactgtagtagtagcagctacagaaaggtagtagtgagacgtgaagccagctggacttcctgggttgaatggggacctggagaacttttctgtcttacaagaggattgtaaaatggaccaatcagcactctgtaagatggaccaatcagcgctctgtaaaatggaccaatcagcaggacatgggcggggacaataagggaataaaagctggcgagcgcggcaccccaccagagtctgcttccacgctgtgggagctttgttctcttgctctacacaataaatcttgctgctgct

SEQ ID NO: 344695 - DNA, 1389 bp, Artificial Sequence
  derived and/or modified sequence
ggtgcgaccaagccctggctccagctctagcgggtatctgcccaccatggccctggtgctgatcctccagctgctgaccctctggcctctgtgtcacacagacatcactccgtctgtccccccagcttcataccaccctaagccatggctgggagctcagccggctacagttgtgacccctggggtcaacgtgaccttgagatgccgggcaccccaacccgcttggagatttggacttttcaagcctggagagatcgctccccttctcttccgggatgtgtcctccgagctggcagaattctttctggaggaggtgactccagcccaagggggaatttaccgctgctgctaccgaaggccagactgggggccgggtgtctggtcccagcccagcgatgtcctggagctgctggtgacagaggagctgccgcggccgtcgctggtggcgctgcccgggccggtggtgggtcctggcgccaacgtgagcctgcgctgcgcgggccgcctgcggaacatgagcttcgtgctgtaccgcgagggcgtggcggccccgctgcagtaccgccactccgcgcagccctgggccgacttcacgctgctgggcgcccgcgcccccggcacctacagctgctactatcacacgccctccgcgccctacgtgctgtcgcagcgcagcgaggtgctggtcatcagctgggaagactctggctcctccgactacacccgggggaacctagtccgcctggggctggccgggctggtcctcatctccctgggcgcgctggtcacttttgactggcgcagtcagaaccgcgctcctgctggtatccgcccctgagccccaggagcactgcagcccgagacttccaacctgagtggcggagaagctgggaccctgggctggactgtcctttcctgcagccccacagtcctgctggctgagctccgcggaacggtccttagaccccgctgtgccctgtgctgtagcttctttccaggcctttcccaaggagtagctgaaaggaagacgcgattagtggttaagacttccaagccagaagacagagggttcgaatcccagcactgccgtctactcactgtagtagtagcagctacagaaaggtagtagtgagacgtgaagccagctggacttcctgggttgaatggggacctggagaacttttctgtcttacaagaggattgtaaaatggaccaatcagcactctgtaagatggaccaatcagcgctctgtaaaatggaccaatcagcaggacatgggcggggacaataagggaataaaagctggcgagcgcggcaccccaccagagtctgcttccacgctgtgggagctttgttctcttgctctacacaataaatcttgctgctgct

SEQ ID NO: 344696 - DNA, 804 bp, Artificial Sequence
  derived and/or modified sequence
atggctctcgtcctaattttgcagctcctgactctgtggccactatgccatacagacattaccccttccgtcgccattattgtgcccccagccagttatcaccccaagccctggttaggtgcccaacctgctactgtagtcacacctggggtcaatgtcacgctgagatgccgcgctcctcagcctgcctggaggtttgggttgtttaagcctggggaaattgctcccttactgtttagagatgtgtctagtgagctggccgagttttttctggaagaagttacacctgcccagggcggtatttatcgatgttgttaccggagacccgattggggtccaggcgtgtggtcgcagccctcagacgtgctcgagttgttagtgactgaggaactgccaaggccctctttagtggctctgcctgggccagtcgtgggtcccggagccaacgtttccctacggtgcgctggtcgtctccggaacatgagtttcgtgctgtacagggagggggtggccgctcccctgcagtatcggcatagcgcccagccttgggcagacttcaccctactgggagccagggccccaggcacttactcatgctactatcacaccccctcagccccatatgttctgtcccagcggtctgaagttctggttatttcttgggaggactccggctccagcgattacacccggggaaacctggttcgcttaggactggctggcctcgtactgatctcgctcggtgcccttgttaccttcgactggcgaagccaaaatagagcgccagctggaattagaccatag

SEQ ID NO: 344697 - DNA, 804 bp, Artificial Sequence
  derived and/or modified sequence
atggcccttgtgctcatattacagctgttaaccctctggccattatgccatacagatatcacaccaagtgttgccattatcgttcctccagcctcctaccacccaaaaccatggttgggcgcgcagccggcaacagttgttaccccaggtgtgaacgtgactctgcgttgcagagctccacagccagcgtggaggttcggattatttaagcccggggaaattgcccccctactgtttcgcgatgtgtctagcgaactggccgagttcttcctggaggaggtgacccccgcacaggggggtatctaccgatgctgttataggcggcccgattggggtcctggagtttggtcccaaccatctgacgtgctcgaactgctcgttaccgaggagctgcctcgaccaagcctggttgccctaccgggaccagtggtgggtccgggagcaaatgtctcgctgcggtgcgctgggagactgcgcaacatgtcattcgtactttacagagaaggagtcgcggccccccttcagtataggcactcagcccagccatgggcagactttactcttctgggagctagggcccccggaacctactcctgctactatcataccccttctgccccttacgttctatcgcagcgctcggaagtgctggttatctcatgggaggactcaggaagctcagattacacacggggcaatctcgtcagactcggtttggccggtctggtactgatttctttaggagccttggtgacatttgattggagatctcagaaccgcgcacccgcgggaattcgtccctag

SEQ ID NO: 344698 - DNA, 804 bp, Artificial Sequence
  derived and/or modified sequence
atggcattggtgctaatactccagttgttgactctgtggccgttgtgccacactgatattactcctagcgtggccataatcgtcccacctgcctcgtatcatccaaaaccatggcttggcgcccagccagctactgtagtcaccccaggcgttaacgtgacgttacgctgtagagctccacaaccagcatggagattcgggctctttaaacccggagagattgcgcccttgttatttagagacgtgtcctcagagctagctgagtttttcctggaggaagtgactcctgcgcaggggggtatctacaggtgttgttacagacgaccagattggggaccaggggtttggtcgcaaccgagcgacgtgctggaattgcttgtcactgaagagcttcccaggccatctttggtagctttaccaggacctgttgtgggtcccggggctaacgtgtcactcagatgtgccggacgcctccggaatatgtcttttgtactgtatcgggaaggtgtggcagctcctctccagtataggcacagcgcacaaccctgggcggacttcaccttactcggcgcccgtgcaccaggcacctactcttgttactaccacaccccgtccgctccttacgtgctcagtcaaagatctgaagtgcttgtgatttcttgggaggactctggatcctctgattataccaggggcaatctcgtgcgcttaggtttagccggtttggtactcatctcccttggggccctagtgacatttgactggagatcccagaatcgcgcgcctgccggcattcgcccttag

SEQ ID NO: 344699 - DNA, 804 bp, Artificial Sequence
  derived and/or modified sequence
atggccctggtgctgatcctgcagctgctgaccctgtggcccctgtgccacaccgacatcacccccagcgtggccatcatcgtgccccccgccagctaccaccccaagccctggctgggcgcccagcccgccaccgtggtgacccccggcgtgaacgtgaccctgagatgcagagccccccagcccgcctggagattcggcctgttcaagcccggcgagatcgcccccctgctgttcagagacgtgagcagcgagctggccgagttcttcctggaggaggtgacccccgcccagggcggcatctacagatgctgctacagaagacccgactggggccccggcgtgtggagccagcccagcgacgtgctggagctgctggtgaccgaggagctgcccagacccagcctggtggccctgcccggccccgtggtgggccccggcgccaacgtgagcctgagatgcgccggcagactgagaaacatgagcttcgtgctgtacagagagggcgtggccgcccccctgcagtacagacacagcgcccagccctgggccgacttcaccctgctgggcgccagagcccccggcacctacagctgctactaccacacccccagcgccccctacgtgctgagccagagaagcgaggtgctggtgatcagctgggaggacagcggcagcagcgactacaccagaggcaacctggtgagactgggcctggccggcctggtgctgatcagcctgggcgccctggtgaccttcgactggagaagccagaacagagcccccgccggcatcagaccctag

SEQ ID NO: 344700 - protein, 1065 aa, Artificial Sequence
  derived and/or modified sequence
MSRKHRLEARPDLREFFSLNLRSHTRSTMTSPQLEWTLQTLLEQLNEDELKSFKSLLWAFPLEDVLQKTPWSEVEEADGKKLAEILVNTSSENWIRNATVNILEEMNLTELCKMAKAEMMEDGQVQEIDNPELGDAEEDSELAKPGEKEGWRNSMEKQSLVWKNTFWQGDIDNFHDDVTLRNQRFIPFLNPRTPRKLTPYTVVLHGPAGVGKTTLAKKCMLDWTDCNLSPTLRYAFYLSCKELSRMGPCSFAELISKDWPELQDDIPSILAQAQRILFVVDGLDELKVPPGALIQDICGDWEKKKPVPVLLGSLLKRKMLPRAALLVTTRPRALRDLQLLAQQPIYVRVEGFLEEDRRAYFLRHFGDEDQAMRAFELMRSNAALFQLGSAPAVCWIVCTTLKLQMEKGEDPVPTCLTRTGLFLRFLCSRFPQGAQLRGALRTLSLLAAQGLWAQMSVFHREDLERLGVQESDLRLFLDGDILRQDRVSKGCYSFIHLSFQQFLTALFYALEKEEGEDRDGHAWDIGDVQKLLSGEERLKNPDLIQVGHFLFGLANEKRAKELEATFGCRMSPDIKQELLQCKAHLHANKPLSVTDLKEVLGCLYESQEEELAKVVVAPFKEISIHLTNTSEVMHCSFSLKHCQDLQKLSLQVAKGVFLENYMDFELDIEFERCTYLTIPNWARQDLRSLRLWTDFCSLFSSNSNLKFLEVKQSFLSDSSVRILCDHVTRSTCHLQKVEIKNVTPDTAYRDFCLAFIGKKTLTHLTLAGHIEWERTMMLMLCDLLRNHKCNLQYLRLGGHCATPEQWAEFFYVLKANQSLKHLRLSANVLLDEGAMLLYKTMTRPKHFLQMLSLENCRLTEASCKDLAAVLVVSKKLTHLCLAKNPIGDTGVKFLCEGLSYPDCKLQTLVLQQCSITKLGCRYLSEALQEACSLTNLDLSINQIARGLWILCQALENPNCNLKHLRLWSCSLMPFYCQHLGSALLSNQKLETLDLGQNHLWKSGIIKLFGVLRQRTGSLKILRLKTYETNLEIKKLLEEVKEKNPKLTIDCNASGATAPPCCDFFC

SEQ ID NO: 344701 - protein, 1037 aa, Artificial Sequence
  derived and/or modified sequence
MTSPQLEWTLQTLLEQLNEDELKSFKSLLWAFPLEDVLQKTPWSEVEEADGKKLAEILVNTSSENWIRNATVNILEEMNLTELCKMAKAEMMEDGQVQEIDNPELGDAEEDSELAKPGEKEGWRNSMEKQSLVWKNTFWQGDIDNFHDDVTLRNQRFIPFLNPRTPRKLTPYTVVLHGPAGVGKTTLAKKCMLDWTDCNLSPTLRYAFYLSCKELSRMGPCSFAELISKDWPELQDDIPSILAQAQRILFVVDGLDELKVPPGALIQDICGDWEKKKPVPVLLGSLLKRKMLPRAALLVTTRPRALRDLQLLAQQPIYVRVEGFLEEDRRAYFLRHFGDEDQAMRAFELMRSNAALFQLGSAPAVCWIVCTTLKLQMEKGEDPVPTCLTRTGLFLRFLCSRFPQGAQLRGALRTLSLLAAQGLWAQMSVFHREDLERLGVQESDLRLFLDGDILRQDRVSKGCYSFIHLSFQQFLTALFYALEKEEGEDRDGHAWDIGDVQKLLSGEERLKNPDLIQVGHFLFGLANEKRAKELEATFGCRMSPDIKQELLQCKAHLHANKPLSVTDLKEVLGCLYESQEEELAKVVVAPFKEISIHLTNTSEVMHCSFSLKHCQDLQKLSLQVAKGVFLENYMDFELDIEFERCTYLTIPNWARQDLRSLRLWTDFCSLFSSNSNLKFLEVKQSFLSDSSVRILCDHVTRSTCHLQKVEIKNVTPDTAYRDFCLAFIGKKTLTHLTLAGHIEWERTMMLMLCDLLRNHKCNLQYLRLGGHCATPEQWAEFFYVLKANQSLKHLRLSANVLLDEGAMLLYKTMTRPKHFLQMLSLENCRLTEASCKDLAAVLVVSKKLTHLCLAKNPIGDTGVKFLCEGLSYPDCKLQTLVLQQCSITKLGCRYLSEALQEACSLTNLDLSINQIARGLWILCQALENPNCNLKHLRLWSCSLMPFYCQHLGSALLSNQKLETLDLGQNHLWKSGIIKLFGVLRQRTGSLKILRLKTYETNLEIKKLLEEVKEKNPKLTIDCNASGATAPPCCDFFC

SEQ ID NO: 344702 - DNA, 3198 bp, Artificial Sequence
  derived and/or modified sequence
atgagcagaaagcacagactggaggccagacccgacctgagagagttcttcagcctgaacctgagaagccacaccagaagcaccatgaccagcccccagctggagtggaccctgcagaccctgctggagcagctgaacgaggacgagctgaagagcttcaagagcctgctgtgggccttccccctggaggacgtgctgcagaagaccccctggagcgaggtggaggaggccgacggcaagaagctggccgagatcctggtgaacaccagcagcgagaactggatcagaaacgccaccgtgaacatcctggaggagatgaacctgaccgagctgtgcaagatggccaaggccgagatgatggaggacggccaggtgcaggagatcgacaaccccgagctgggcgacgccgaggaggacagcgagctggccaagcccggcgagaaggagggctggagaaacagcatggagaagcagagcctggtgtggaagaacaccttctggcagggcgacatcgacaacttccacgacgacgtgaccctgagaaaccagagattcatccccttcctgaaccccagaacccccagaaagctgaccccctacaccgtggtgctgcacggccccgccggcgtgggcaagaccaccctggccaagaagtgcatgctggactggaccgactgcaacctgagccccaccctgagatacgccttctacctgagctgcaaggagctgagcagaatgggcccctgcagcttcgccgagctgatcagcaaggactggcccgagctgcaggacgacatccccagcatcctggcccaggcccagagaatcctgttcgtggtggacggcctggacgagctgaaggtgccccccggcgccctgatccaggacatctgcggcgactgggagaagaagaagcccgtgcccgtgctgctgggcagcctgctgaagagaaagatgctgcccagagccgccctgctggtgaccaccagacccagagccctgagagacctgcagctgctggcccagcagcccatctacgtgagagtggagggcttcctggaggaggacagaagagcctacttcctgagacacttcggcgacgaggaccaggccatgagagccttcgagctgatgagaagcaacgccgccctgttccagctgggcagcgcccccgccgtgtgctggatcgtgtgcaccaccctgaagctgcagatggagaagggcgaggaccccgtgcccacctgcctgaccagaaccggcctgttcctgagattcctgtgcagcagattcccccagggcgcccagctgagaggcgccctgagaaccctgagcctgctggccgcccagggcctgtgggcccagatgagcgtgttccacagagaggacctggagagactgggcgtgcaggagagcgacctgagactgttcctggacggcgacatcctgagacaggacagagtgagcaagggctgctacagcttcatccacctgagcttccagcagttcctgaccgccctgttctacgccctggagaaggaggagggcgaggacagagacggccacgcctgggacatcggcgacgtgcagaagctgctgagcggcgaggagagactgaagaaccccgacctgatccaggtgggccacttcctgttcggcctggccaacgagaagagagccaaggagctggaggccaccttcggctgcagaatgagccccgacatcaagcaggagctgctgcagtgcaaggcccacctgcacgccaacaagcccctgagcgtgaccgacctgaaggaggtgctgggctgcctgtacgagagccaggaggaggagctggccaaggtggtggtggcccccttcaaggagatcagcatccacctgaccaacaccagcgaggtgatgcactgcagcttcagcctgaagcactgccaggacctgcagaagctgagcctgcaggtggccaagggcgtgttcctggagaactacatggacttcgagctggacatcgagttcgagagatgcacctacctgaccatccccaactgggccagacaggacctgagaagcctgagactgtggaccgacttctgcagcctgttcagcagcaacagcaacctgaagttcctggaggtgaagcagagcttcctgagcgacagcagcgtgagaatcctgtgcgaccacgtgaccagaagcacctgccacctgcagaaggtggagatcaagaacgtgacccccgacaccgcctacagagacttctgcctggccttcatcggcaagaagaccctgacccacctgaccctggccggccacatcgagtgggagagaaccatgatgctgatgctgtgcgacctgctgagaaaccacaagtgcaacctgcagtacctgagactgggcggccactgcgccacccccgagcagtgggccgagttcttctacgtgctgaaggccaaccagagcctgaagcacctgagactgagcgccaacgtgctgctggacgagggcgccatgctgctgtacaagaccatgaccagacccaagcacttcctgcagatgctgagcctggagaactgcagactgaccgaggccagctgcaaggacctggccgccgtgctggtggtgagcaagaagctgacccacctgtgcctggccaagaaccccatcggcgacaccggcgtgaagttcctgtgcgagggcctgagctaccccgactgcaagctgcagaccctggtgctgcagcagtgcagcatcaccaagctgggctgcagatacctgagcgaggccctgcaggaggcctgcagcctgaccaacctggacctgagcatcaaccagatcgccagaggcctgtggatcctgtgccaggccctggagaaccccaactgcaacctgaagcacctgagactgtggagctgcagcctgatgcccttctactgccagcacctgggcagcgccctgctgagcaaccagaagctggagaccctggacctgggccagaaccacctgtggaagagcggcatcatcaagctgttcggcgtgctgagacagagaaccggcagcctgaagatcctgagactgaagacctacgagaccaacctggagatcaagaagctgctggaggaggtgaaggagaagaaccccaagctgaccatcgactgcaacgccagcggcgccaccgcccccccctgctgcgacttcttctgctag

SEQ ID NO: 344703 - DNA, 3198 bp, Artificial Sequence
  derived and/or modified sequence
atgtcgaggaagcatagactggaagcacgcccggatctgcgggagtttttttctctgaatttgagatctcacacccgatccactatgaccagtcctcagctcgaatggaccctgcaaaccctcttggagcaattgaacgaggatgagctgaagagctttaaaagcctgttgtgggcatttccactcgaggatgtcttgcagaaaactccttggagcgaggtcgaggaagccgacggcaaaaaactggcggagatactggtcaacacgagctccgaaaactggattcggaacgcaactgtcaatatactcgaagaaatgaatctgacagagctttgtaagatggcaaaggcagaaatgatggaagatggtcaggtgcaagagatcgacaatcccgagctcggagatgctgaagaggatagtgaactggccaagcccggagaaaaggaaggttggaggaactcaatggagaaacagtctttagtgtggaagaatactttttggcaaggagatatcgataactttcacgacgacgttacgttaaggaaccagaggttcataccattcctgaatcctcggacgccgcggaagctgaccccttacaccgttgtgctgcatggacctgccggagtggggaagactaccctggccaagaaatgcatgctcgattggaccgattgtaatttgtcccctaccctgagatatgcattttacctgtcttgcaaggagttgtcccggatgggcccctgttcattcgctgaacttatatctaaggattggccggagctccaggacgacatcccatctatcctagctcaggcccaacggatcctgttcgtggtggacggcctggatgagctgaaagtaccacctggcgcactgatacaggatatttgtggcgattgggagaagaagaaacctgtgccagtactactggggagtctgcttaaacgtaagatgctgcccagggctgccttactggttacgaccagaccacgagcgctacgggatctgcagttactcgctcaacagccaatttacgtgagggtggagggattcctcgaggaggaccggagagcttatttcctccgccactttggagacgaggaccaagctatgcgggccttcgagttgatgcggtcaaacgccgctctcttccagttgggaagcgcccctgccgtttgttggatcgtctgcacaactttgaagctccagatggagaagggcgaggatccagtgccaacctgcttaacaaggacaggtttgttccttagatttctgtgttccaggttccctcagggggctcaactgcggggcgccctcagaacactctcgctgctggccgcgcaggggctgtgggctcagatgtcagtcttccatcgcgaagacctggagcgtttaggtgttcaagaaagcgatttgagactgttcttggatggcgatatcctcaggcaggatagggtttctaaagggtgttattcatttattcaccttagtttccagcaattcctgaccgcactgttctacgctctggaaaaagaagaaggggaagacagagacgggcacgcctgggacattggggacgttcagaagttgctgtctggcgaggaaagactcaagaatcctgacctgattcaggtagggcactttcttttcggcctagcaaacgagaagcgcgctaaagaattggaggccacctttggctgccggatgtcccccgatataaaacaggagctactccagtgcaaagctcacctgcacgcgaataaaccactgagcgtgacagaccttaaagaagtcctggggtgcctctacgagtctcaggaggaagagctggccaaggtggtggtggccccctttaaagagattagcattcatctgaccaacaccagcgaggtcatgcattgtagtttcagcctcaaacattgtcaagatcttcagaagctgagcttgcaggtggccaagggagtgttcctcgagaattatatggactttgaactcgatattgaattcgagcgctgtacttatctgacgatccctaattgggcccgccaggacctgcgatctctgcgattgtggacggacttttgttctttgttcagttctaattctaatcttaagttcttggaggtcaagcaaagctttctgtctgactcatccgtgaggattctctgtgaccacgtgaccagaagcacatgccaccttcagaaggtcgagatcaagaacgttacgcctgacaccgcatatagagatttctgcttagcttttattggcaagaagacactcacacacttgacacttgctggacatattgaatgggaacggacaatgatgttaatgttgtgtgatctgctcaggaatcacaagtgtaatcttcagtacctgcgcttgggcggtcattgcgcaacaccagagcagtgggcagagtttttttatgttcttaaagccaatcagtctctgaagcacctgcgcctgtccgctaacgtgctgctggatgagggcgcaatgctcctttacaaaacaatgactagacccaagcattttctgcaaatgctgagccttgagaattgccgactgaccgaagcatcttgcaaggatctggccgctgtcctggtggtgtcaaaaaagctcacacacctctgcctggcaaaaaatccaattggtgacacgggcgtgaagttcctgtgcgaggggctgtcctatccagactgcaaacttcagacactggtgctccagcagtgtagcatcactaagctcgggtgccgctatttaagtgaggcacttcaggaagcgtgttccctgacaaacctagacttgtccattaaccaaattgctaggggactgtggatactgtgtcaagccctggagaacccaaattgtaacttaaaacatctgcgcctgtggagctgttcactcatgccgttctactgccagcatctcggaagcgcattgctgagtaaccaaaagctggaaactctcgatctgggccaaaaccatctatggaagtccggcatcatcaaattattcggagtgctaagacaacgcaccggatctctgaagattctaagattgaagacatacgagacaaatctggagatcaagaaactgctggaggaggttaaagaaaaaaacccaaagctgactatcgattgtaatgccagcggagctactgcccctccctgttgcgatttcttctgctag

SEQ ID NO: 344704 - DNA, 3198 bp, Artificial Sequence
  derived and/or modified sequence
atgtccaggaagcacagattagaggcaaggcctgacttgagggagttcttcagccttaacttgcgatcacacacccggagcaccatgaccagccctcagctggagtggacgctccagacattactggaacagctgaatgaggacgaactgaaatcctttaagtcactgctgtgggccttcccactcgaggacgtgctacagaagaccccttggagcgaagtagaagaggctgatgggaaaaagctggctgagattcttgtcaatacaagctctgagaattggatcagaaatgctaccgtgaacattctcgaggaaatgaacctgaccgagctttgtaagatggccaaggctgagatgatggaggacgggcaggtacaggagatcgacaaccccgaactcggggacgcagaggaagactcagaattggccaagcctggcgagaaggaaggctggcggaactctatggagaagcaatcactcgtgtggaagaacacattttggcagggcgatatcgataactttcacgacgacgtgactctgcggaatcagcgttttatcccatttctgaatccccgcacccccagaaaattgaccccttacaccgtagtcctccacggccctgccggggtgggtaagacaaccctggccaaaaagtgcatgcttgattggaccgattgtaacctttcacctactttaagatacgctttctacctcagttgcaaagaactgtctcggatgggtccatgttcttttgctgaactaattagtaaggattggcccgagttgcaggatgacattccctcaatcctggcgcaggcgcagcgcatcctcttcgtggtcgacggactagatgaacttaaagtccctccaggagccctcatacaggacatctgcggtgactgggaaaaaaaaaagcctgtgccagttttactggggtccctcctgaaaaggaaaatgctcccacgcgcagctttgctggttacgacgagaccccgtgctctcagggacctccagctcctggcccagcagccaatctacgtacgcgtcgaagggttcttggaagaggaccgtagagcttactttctgcggcactttggtgatgaagatcaggcaatgcgggccttcgagctcatgaggtcgaacgcagcactcttccagcttgggagcgcccctgccgtgtgctggattgtctgcacgacactgaaactacagatggagaaaggtgaggacccggtccccacctgtctaacacggactggactgtttctgcggttcctctgttcccggttcccccagggggcccagcttcgaggtgctctccgaacgctaagcctactggctgcgcagggcctttgggcacagatgagtgtcttccatcgtgaggacctcgaaaggctgggcgtacaggaatccgatctccgtctcttcctcgatggcgatatcttacgccaggatagagtgtccaagggctgttattccttcattcacctgagctttcaacagttcctcactgccttgttttatgcccttgagaaggaggagggagaggacagggacggccacgcatgggatatcggagacgtgcaaaagttgttatctggcgaagagcgtttgaagaaccctgacctaattcaggttggacattttctctttgggctggctaatgagaagcgggcaaaagagttggaggctaccttcggttgcagaatgtcgcctgacataaagcaggaacttttgcagtgcaaggctcacttgcacgccaataaacctctcagtgtgactgatctcaaagaggtgctcggctgtctatatgagtcacaggaggaggagttggcaaaggtggtggtggcccctttcaaggagatctccatacatctaaccaacaccagtgaggtcatgcactgcagcttcagccttaaacactgccaggacctgcaaaagctgtctctacaggtggctaaaggggtttttcttgagaattatatggacttcgagctcgacatcgaatttgagcgatgtacttacctcacgattcccaactgggctaggcaagacctgcggagcctcagactttggacagatttctgctcacttttttctagcaatagtaacttaaaattcctggaggtaaaacaaagctttctgtcagatagttccgtcaggatcctgtgcgatcatgtcacaagatccacctgtcatcttcagaaggtcgaaatcaaaaacgtgactccagacaccgcctacagagatttttgccttgcttttatcggcaagaaaaccctcacccacctcaccttagccgggcatattgaatgggagagaaccatgatgctgatgttgtgtgatctgctcaggaaccacaagtgtaacttgcagtacctgagactcggcgggcactgcgcaacccccgaacagtgggcagaattcttttacgtgctgaaggccaatcaaagtctaaaacacctgcgattgtctgccaacgtactgctggatgagggggcgatgttgctgtacaagacaatgactcgacccaaacacttcctgcagatgctgtctctcgagaattgcaggctgaccgaggcatcctgtaaagatctcgcagcggtactggtggtgtccaaaaagctgactcacctgtgcctcgccaagaaccccataggtgatacaggggtgaagtttctctgtgagggcctgagctacccagactgcaagctacagacactcgttctgcagcagtgctctatcactaaactcggttgtcgctatctgagcgaggccctgcaagaagcttgctcacttaccaacctggatcttagcattaatcaaatcgccagagggctatggatcctgtgccaggccttggaaaatccaaactgcaatctcaaacacctgaggttgtggtcctgcagtctgatgccattctactgccagcacctgggttcagcgctcctctccaatcagaagctcgagacactggacctgggacagaatcacctgtggaagagtggcattattaagctctttggggtcctgaggcagcggacaggaagcctcaaaatcctccgactgaaaacttacgagaccaaccttgaaattaaaaaactactggaggaagtcaaggaaaagaatcccaagctaactattgattgcaatgctagtggagccaccgcacccccttgctgcgattttttttgctag

SEQ ID NO: 344705 - DNA, 3198 bp, Artificial Sequence
  derived and/or modified sequence
atgtccaggaaacatagactcgaggcccgccccgatctgagggagttcttctctttaaacctgaggtcccatacacggagtacaatgacctccccccagctggagtggactctgcaaacattattagaacaactgaacgaggacgagctcaaaagttttaaaagtctgctgtgggcttttcccctggaggatgtgctgcagaagaccccatggtccgaggtcgaagaggcagatggcaagaaactcgccgagatattggtgaacacaagctctgaaaattggatcaggaatgccaccgtgaacatattagaggaaatgaacctgacagagctctgtaaaatggcaaaggctgaaatgatggaggacgggcaagtgcaggaaatcgacaaccctgagctgggggatgcagaggaagactccgagcttgccaaaccaggtgagaaggaggggtggcgcaatagtatggagaagcagtcactcgtctggaaaaacaccttctggcagggtgacatagacaattttcacgacgacgtcactctgcgcaaccaaaggttcatacctttcctcaatcctcgcactcctcgaaaactcacaccttatacagtagtgctccatgggcccgcaggagtggggaaaactaccctcgctaaaaagtgcatgttggattggactgactgcaacctctctccgactttacgctacgccttttatttatcttgcaaggagctgtctcgcatgggcccgtgttcattcgccgagctaatctctaaagactggccagagttgcaggatgatattccaagtattctggcacaggcccagcggatcttgtttgtggtggatgggctggacgagttgaaggtgccccccggcgccttgatccaagacatttgtggggactgggaaaagaagaagccagtgcccgtgttactagggagcttgttgaagcggaaaatgttgccccgcgcagccctgcttgtgacgacacgaccccgagcactgagggacttacagctgctggcacagcaacctatttatgtgcgcgtggagggctttctggaagaggatcgacgcgcttattttctccgtcatttcggggacgaagatcaggctatgcgggcattcgaactgatgcgttccaacgcggcactttttcaactgggtagtgccccagccgtttgttggatcgtgtgtaccacactgaagctgcagatggagaagggtgaggacccggtgcccacgtgcttgacaaggacaggtctgttcctcaggtttctatgctctagatttcctcagggagcccaactgaggggtgcgctgcggactcttagtctgctggctgcccagggcctatgggcacaaatgtctgtgttccacagagaagacctggagagattgggagttcaagaaagtgacctgaggctgtttttggacggagatatcctacgccaggatcgggtgtctaagggttgttattcattcatccaccttagctttcagcagttcctgactgctttgttctacgctctggagaaggaggagggagaggatagagacggacacgcatgggacatcggcgacgtgcagaagctgctgtcgggagaggaacgactgaaaaaccctgacctgatccaggtaggccattttctgtttgggctcgctaatgaaaaacgggctaaggaattggaagctaccttcggttgtaggatgtcaccggacattaagcaggaactgctgcagtgcaaagctcacttgcacgctaacaagccactaagcgtcaccgacttgaaagaggttctgggctgcttgtacgaatcccaggaggaggagctcgccaaagtggtggtggcccccttcaaagaaatcagcatacacctgactaacacttccgaggtgatgcactgcagcttcagcctcaagcattgtcaggacctgcagaagctctccctgcaggtggcaaagggggtattcttggagaattatatggacttcgaactagatatcgaatttgagagatgtacctacctgactattcctaattgggcccggcaggacctgaggtccttgcgtctgtggaccgatttctgcagtctgttcagttcaaacagcaatctgaaattcctcgaggtcaagcagtcgttcctgagcgattccagtgttcgaatcctgtgtgatcatgtgacaaggtccacatgtcaccttcagaaagtggaaattaaaaacgtaaccccagatacagcgtatcgtgacttctgccttgcttttatcggaaagaagaccctcacacatctgactttggctggacacattgaatgggaacgtacaatgatgttgatgttgtgcgatttgctgcgcaaccataagtgcaatttacagtatttaaggctgggaggacactgcgcaacacctgagcagtgggcagagtttttctacgtgctgaaggctaaccagtctctcaagcacctgcgcctaagcgccaacgtcctgctcgatgagggggcgatgttgctctacaagacgatgacccggccgaaacattttttacagatgttgagtctggagaattgtcggctgacggaagcaagttgcaaggacttagcggccgtgttggtagtaagcaaaaaactgacgcacctgtgtctcgccaagaaccctatcggcgacacaggggtgaagttcctgtgcgagggtttgtcttatcctgattgcaagctgcagacactcgttctgcagcagtgctcaatcaccaagttgggatgtcggtacctgtccgaggccttgcaggaggcctgctccttgaccaacctcgatctcagcattaatcagattgcacgaggactgtggatcctttgtcaggccctggaaaatccaaactgcaaccttaaacaccttcggctctggagctgctccctgatgccgttctactgccagcatttgggaagtgccctgctgtcaaatcaaaagttggagaccctggatttggggcagaatcatctctggaagtctgggattatcaagcttttcggcgtattgcgtcaacgcactggctccctgaagattctccggctgaaaacctatgaaacaaacctcgaaattaaaaagctgttggaggaagttaaggagaaaaatcccaaactgactatcgactgtaacgcctccggtgctaccgcacctccttgttgcgattttttttgctag

SEQ ID NO: 344706 - DNA, 3198 bp, Artificial Sequence
  derived and/or modified sequence
atgagcaggaaacatagactggaggcgcgtccagatcttcgcgagtttttttcactcaatttgcggtcccacaccagatccacaatgacatccccccaacttgagtggaccctccagacactgttagagcagctaaatgaggatgagctaaaatcgttcaaatccctgttatgggcctttccactcgaagacgttttacagaaaacaccctggagcgaggtggaagaagccgatgggaaaaaactggcagaaatcctcgtcaacacctctagtgagaattggattaggaacgccactgtgaacattctggaggaaatgaacctgacagagctttgtaaaatggccaaagccgagatgatggaggacggacaagttcaggagattgataatcccgaactgggtgacgccgaggaggattcagaactggcaaagcccggggagaaagagggttggcgaaactcaatggaaaaacaaagcctagtatggaaaaatacgttctggcagggggacatcgataactttcacgatgatgtgaccctgaggaatcaacgatttattccgttcttgaatccccgcacgcctaggaaactgactccttacacagtggttcttcatggacccgccggagtgggaaaaaccactctagcgaagaaatgtatgcttgattggaccgactgtaacctcagtcccacacttcggtatgctttctacttatcctgtaaggaactgtcccggatgggaccctgctcttttgccgaactgatctctaaggactggccagaattacaggatgatattccatccattctcgcacaagcccaaagaatcctatttgttgtggacgggctagacgaactgaaagtgcccccaggtgctctcattcaagatatttgcggtgactgggagaagaagaaaccagtgccagttctcctagggagcttattgaagcgcaagatgttgcctcgggccgccctgctcgtgaccacacggccccgggccctgcgtgatctccagctgctcgcccagcaacctatttacgtgcgagtcgagggatttcttgaagaagatcgccgggcatacttcctcagacactttggggacgaggaccaggcaatgagagcctttgaattgatgcgatcaaatgccgccctgttccagttgggcagcgcccccgctgtttgttggatagtgtgtaccaccctgaagcttcaaatggagaaaggcgaggatccagtgcctacctgcctcacgagaacaggactgttcctgagatttctctgttctcgttttccccagggcgcccagctgcgcggcgccctgcgtacactgtcactcctggcggcccagggactgtgggcccaaatgtcagtgttccatagggaggacctggagcgcctgggagtccaggagagcgatcttcgcctgtttctggacggcgatattctgcgtcaggacagagtgagtaagggctgttattctttcatccatctctccttccagcagtttttgacagctttattttacgcgctcgaaaaagaagagggggaggaccgcgatggacatgcgtgggacattggagatgtacagaaactgctgtccggggaggagaggcttaagaaccccgacctaatccaggtgggtcactttcttttcggcttggcaaatgagaagcgcgcaaaggaacttgaagctacattcggatgtcgtatgagtcccgatatcaagcaggaactactccagtgcaaggcccacctgcatgcaaacaagcccctttctgtcacagacctaaaagaggtcctcgggtgcttgtacgagtcccaggaggaggaactggcgaaagtggtcgtcgccccctttaaggagatatctattcacctcaccaacacaagcgaagtcatgcactgtagcttctctttgaagcactgccaggacctccagaaactctccttgcaggtcgctaaaggtgtgttcttggagaactacatggattttgagctggacatcgagtttgagcggtgcacttacttgaccatccccaattgggcgagacaggatctgaggtctctccgactttggacagatttttgcagcctgttttctagtaatagcaatctaaaattcctggaggtgaaacaatcttttctgtcagactccagcgttagaatcctgtgcgaccatgtgacccggtccacctgtcacctgcagaaagtggagattaaaaatgttactccagatactgcatatagagacttctgccttgcctttattggaaagaagaccctgactcaccttacattggctggacacatcgagtgggagcgaaccatgatgctgatgctttgcgacctactcagaaatcacaagtgtaatcttcagtacctcaggctcggcggtcattgtgcaaccccagaacagtgggcggaatttttttatgtgctcaaagccaaccagagtctgaagcatctgagacttagtgccaacgtgttgctggatgaaggcgcaatgctgctctacaaaacaatgactcgacccaagcactttctgcaaatgttgtctttggagaactgtcggctcacagaagcgtcctgcaaagatctggcggccgtcctagtcgtgagcaagaaactgactcacctgtgtctggctaagaacccaatcggagacactggagtcaagttcctgtgtgaaggacttagctaccccgactgtaagttacagacccttgttctgcagcagtgttctattaccaaacttggctgcagatacttgagcgaggcactgcaggaagcctgttccctaacaaatcttgacttgtctataaaccagatcgcccgcgggttgtggattttgtgccaggcacttgaaaacccgaactgcaaccttaagcacctccgtctgtggtcctgtagcctgatgcccttttattgccaacatcttgggagcgcccttctctcgaatcagaagctagaaacccttgacttggggcaaaatcacttgtggaaatctgggatcatcaagctcttcggggtcctgcgccagaggacaggcagtcttaaaatcctacggttgaaaacctacgaaaccaacctggagatcaagaagctgttagaggaggtcaaagagaaaaaccctaagctgacaatcgactgcaacgcctcaggcgcaacggcacctccttgctgcgatttcttctgttag

SEQ ID NO: 344707 - DNA, 3198 bp, Artificial Sequence
  derived and/or modified sequence
atgagcaggaagcacaggctggaggcccgccctgatctccgtgagttcttttcgcttaatttgcgtagtcacacccggtccacaatgacaagcccccagttagaatggacattgcaaactctcctagagcagcttaacgaggatgagttgaaaagcttcaagagcttactctgggcatttcctctcgaggatgtgcttcagaagaccccctggtctgaggtagaggaagctgacgggaagaaattagccgagatactggtcaatacttcttcagagaattggattaggaacgctacagtgaacatactggaggagatgaatcttacagaactctgtaagatggccaaggcagagatgatggaagacgggcaggtgcaagaaattgacaacccagagctcggcgacgccgaagaagattcagagctggccaagcccggagagaaggaggggtggaggaatagcatggagaaacagagcttggtgtggaagaacaccttctggcagggcgatattgataattttcacgatgatgtcacactacgtaaccagaggttcattccattcttgaacccaaggacccccaggaaactgactccgtatactgtggtgcttcacggtccagctggggtggggaagacaacgctagctaagaagtgtatgctcgactggacagattgcaatttgtcaccgactttgcgttatgccttttatctgagctgtaaagagttgtccagaatgggcccctgttcctttgctgaactgatcagcaaggactggcccgagttgcaggacgatatcccctccatacttgcccaggcccaaagaattctgttcgttgtagacggactagacgagctgaaggtgcccccaggagcactcatccaggacatttgcggcgattgggagaaaaaaaagccagttccagtattgctcggctccttgctgaaaagaaagatgttgcccagggccgccctcctggtgaccaccaggccaagggcactgagagatctgcagttactcgcacagcagcctatctacgtgagggtcgaaggctttttggaggaggataggagagcgtacttcttgagacatttcggcgacgaggaccaggccatgcgggctttcgagctgatgcgcagcaacgcagccctcttccaacttgggtccgctcctgcagtgtgttggatcgtgtgcacaacgctcaaactccagatggaaaagggggaagatccagtcccaacttgcctgactcgcacgggactcttcctgaggtttctgtgcagcagatttccacaaggggcccagctgcgcggagccctcagaactttgagtctcctggccgctcaggggctctgggcccagatgtccgtgttccatagggaggaccttgaaaggctaggagttcaagagagtgatctgcgactgtttctggatggggacatcctcagacaggaccgtgtcagtaaggggtgctattcgtttatccatctgtccttccagcagttcttaaccgccctcttctatgctttagagaaagaggaaggggaggatcgagatggtcacgcatgggatatcggagacgtccaaaaattgctgtcaggggaagaacgacttaagaatcccgacctgatccaggtggggcacttcctgttcggcttggccaatgagaagcgggccaaagagcttgaggcaactttcgggtgcaggatgtcacctgatattaagcaagagctgctacagtgtaaggcccacctgcatgccaataaaccgctgtctgttacagacctcaaagaagtattaggatgtctgtacgaatcccaagaggaagagctcgcaaaggtggtcgtcgcgccctttaaggaaatcagtatccaccttactaacacttcagaagtaatgcattgctccttcagcctgaagcattgccaagacctccagaagctctccctccaggtggccaagggggtgttcctcgagaactatatggacttcgaattagacatagagtttgaaagatgcacctatctgaccatccctaattgggcacggcaggacctacgatctttgaggctgtggacagatttttgtagcctgttctcatctaactcaaatctgaagttcctggaggtgaaacagtcgtttctgtccgactcttcagtaagaatactctgcgaccatgttacacgttccacctgccacctgcagaaggtggagatcaagaacgttacccctgacacagcctacagagatttttgcctggcttttatcggaaagaagacactgactcacctcacacttgctggccatattgagtgggaaagaactatgatgctcatgctgtgcgatcttctgagaaaccataagtgcaatctgcagtaccttaggctagggggccattgcgccacccctgagcagtgggccgaattcttctacgtgctgaaggctaaccagagccttaagcatttgcggttatccgccaatgtactgctggacgagggagccatgctcctgtataagacaatgacaaggccaaagcacttcctgcaaatgctctcccttgagaattgccgactgacagaggcgtcatgcaaggatttggccgcagtgctggtcgtttccaagaagctgacacatctgtgtctcgctaagaatcccatcggcgataccggcgttaaatttttatgcgagggactgtcctatcctgattgcaaactacagacactggtgcttcagcagtgttccatcactaaactggggtgcaggtacctgagtgaagctttacaggaggcttgtagtttgactaacctggatcttagtataaaccagatcgcccgagggctttggatcctctgtcaggccctagaaaacccgaattgcaacttaaaacatctacggctttggagctgttcacttatgcccttctattgccaacacctggggtcagcgctgttaagcaatcagaagttagaaactctggatctgggacagaaccacctgtggaaaagtggtattattaagttatttggagtgctgcgccagaggacagggtccctaaagatactgagactgaagacatacgaaactaatctggagattaagaaacttctcgaggaggttaaagaaaaaaatccaaaactgacaatcgactgcaatgcctcaggcgccacggcaccaccatgttgtgatttcttttgttag

SEQ ID NO: 344708 - DNA, 3198 bp, Artificial Sequence
  derived and/or modified sequence
atgtcccgcaagcaccggctggaggcgagacccgacctcagagagtttttctcgctaaatttgaggtcacacactcgttccacgatgacaagtccccagctggaatggaccttgcagactctgcttgagcagttaaatgaggacgagttgaagtcatttaagtcccttctttgggccttcccccttgaggatgtcctccagaaaacaccctggtcggaggtggaggaagctgatggcaaaaaactggccgaaattcttgtgaatactagcagtgagaactggatccgcaatgccactgtcaacattttagaagagatgaatctcacagagctatgtaaaatggcaaaagccgagatgatggaggacggccaggtgcaggagatagataacccagaactgggtgatgccgaagaggactctgagctggccaaaccgggcgagaaggaaggatggcgcaatagcatggagaaacagtccttggtatggaaaaacactttttggcaaggtgacattgacaattttcacgatgatgtcaccctccgcaatcagcgattcatccctttcctgaaccctaggacacctaggaagctgaccccatacaccgttgtactgcatggacctgccggagttggcaagaccacactggctaagaagtgtatgttggactggaccgattgtaacctatcccctactttgcgatacgccttctacctgagctgtaaagaactttcacggatgggtccctgctcctttgccgaactgatttccaaagattggcctgagcttcaggatgatattcctagcatcctcgcccaggcccagaggatccttttcgtggtagatgggctggatgaattaaaggtgccccctggggccctcatccaagacatctgtggggactgggaaaagaagaagccagtccctgtgctgctgggctcccttctgaagagaaaaatgcttcccagggccgcgctgctggtgaccacacgacctagggcactacgtgacctgcagctcttggcccagcagcccatttatgtccgcgtggaaggattcctcgaggaagacaggcgggcatatttcctacgacatttcggtgatgaggaccaggcaatgagagcctttgaactgatgagaagcaatgctgccctcttccagctcgggtccgccccggcagtgtgttggattgtgtgtaccaccctaaagctgcagatggagaaaggtgaggatcctgtgccaacatgccttactaggacagggctcttcctccgttttctctgtagccgctttccccaaggggcacagctgaggggcgcgttgaggaccctctcccttctcgccgcacaaggattgtgggcccaaatgtccgtgttccaccgcgaagatcttgagagactgggagtacaagagagcgacttgaggctatttcttgacggcgatattctccgtcaagatagggtctcaaagggttgctattcattcattcatctgtcattccagcagttcctgactgccctattttatgctctcgagaaagaggagggtgaagaccgcgatggccatgcctgggatatcggggacgtgcagaagctcctgagcggcgaggaacgactcaaaaatcctgatctgatccaagtggggcatttcctctttggcctagcgaacgagaaaagggcgaaggaactcgaagccaccttcggttgtaggatgagtcctgacattaaacaggagctgctccagtgcaaggcacacctgcacgctaataaaccactcagtgtcacagacctgaaagaggtgcttgggtgtctatacgagtcccaggaggaagaattggccaaggtagtagtggccccattcaaggaaatcagtattcacctaactaacaccagcgaggtgatgcactgttccttcagtctcaagcactgccaggacctgcagaagctcagccttcaggtggcaaagggcgtgtttctggagaattacatggacttcgaacttgacatagagttcgaacgatgcacatacctgacaatcccaaattgggctcgtcaggacttgaggagcctgagattgtggactgacttctgttccctcttctccagcaattccaacttgaagtttcttgaagtgaagcagagctttttaagtgatagtagcgtccgaattctatgcgatcacgtgacaaggagtacctgccacctccaaaaagtcgagatcaagaacgtgaccccagacacggcctacagggatttctgtttggctttcatcggtaaaaaaaccctaacccaccttactttagctggccacattgagtgggagcgtacgatgatgttaatgctgtgcgacctcctgcgcaatcataagtgcaatctccagtatctgcgtctaggcgggcactgcgctacacctgaacagtgggctgagtttttctatgtgctgaaggcgaatcagtctctcaagcaccttagactttcagcaaacgtgttactggatgagggcgccatgctcttatacaagaccatgacccggcccaaacactttcttcaaatgctcagtctggaaaattgccgcctgaccgaagcaagctgcaaggatctcgcagccgtgctcgttgtgagcaaaaagcttacgcatctttgtctggcaaagaaccccattggggacacgggcgttaagtttctctgcgagggcctcagctacccagactgcaaactgcagactcttgtcctgcagcagtgcagcatcaccaagttggggtgtcgatacctaagtgaggctctgcaagaggcttgttccttaacaaatctggacctaagcatcaatcaaatcgccaggggactatggattctttgccaggcacttgagaacccgaattgtaacctgaagcacctgcgactctggtcctgctctcttatgcctttctattgccagcacctgggctcagctcttctgtcaaaccagaagctggagacactcgatctggggcagaatcacctgtggaagtccgggattataaagctttttggggtactaaggcaacgaacaggcagtctcaagatactacgcctgaaaacatacgagaccaatctcgagataaagaagttgctggaagaggtcaaagaaaaaaaccccaaacttacaatcgactgtaatgcatcaggagcaacagcccccccttgttgcgatttcttttgttag

SEQ ID NO: 344709 - DNA, 3198 bp, Artificial Sequence
  derived and/or modified sequence
atgtcaagaaagcaccggctggaggcaaggcctgacctgagggagttcttttcactgaacttgagaagtcacactcgcagtaccatgacgtctccccagctcgagtggactcttcagacccttctggagcagctgaatgaagatgaactaaagtcgtttaaatctctgctgtgggccttcccactggaagatgtgctgcagaagacaccctggagtgaggtcgaggaagcagatggaaaaaaactcgctgagatcctcgttaacacgtcctctgaaaactggatccggaacgctacagtgaatatcctcgaagaaatgaacttgactgagctctgtaagatggccaaggccgaaatgatggaggacgggcaggtgcaggaaatagataaccccgagctcggtgacgccgaggaagattccgagttggctaagcccggcgagaaagaagggtggaggaactccatggaaaagcagtcactcgtgtggaaaaacactttctggcagggcgatatcgataattttcacgacgacgtcaccctgcgaaatcagagatttatcccgtttctgaaccccagaaccccccgaaagcttactccttacactgtcgtgctgcatggcccagcaggagttggcaagactacactggcgaagaagtgcatgctggattggaccgactgcaatctctctcccacgctgaggtacgcattctacctatcttgtaaggagttaagtaggatgggcccttgttccttcgcagaactgattagcaaggactggcccgagttgcaggatgacatacctagcatccttgcacaggcgcagcgtatcctgtttgtggtggacggcctggatgagctgaaagttccgccgggtgccctgatccaggacatctgcggggactgggaaaaaaaaaaacctgtacccgtcctgctggggagcctattaaagagaaagatgctgcctcgggccgcattactagttacaacccgccccagagcattacgggacctccagctgctggcccagcagccgatttacgtcagggttgaagggttccttgaggaagatagaagggcctactttctgcgtcattttggagacgaggaccaggcgatgagagccttcgagctcatgcgcagtaatgcggccttgttccagctgggtagcgcccccgcggtgtgctggatcgtttgcacaactctgaagctgcagatggaaaagggcgaggaccccgtacccacctgtctgacaagaaccggactctttttacgattcctgtgctctcgtttcccgcagggagctcagctccgtggtgcgctgcggacattgtccctgcttgcggcacagggactctgggcccagatgtcagtgttccatcgtgaagatctggagaggttaggggtgcaggagagtgaccttagactgtttctcgatggtgacatcttgagacaggatagggtttcgaaggggtgttattccttcattcacctgtctttccagcagttcttaaccgcactgttctacgcactcgagaaggaggagggggaagacagagacggccatgcgtgggacatcggggatgtgcaaaagctcctgtccggggaggagcggctcaagaacccagatttgattcaggtcggacatttcctatttggccttgccaacgaaaagcgcgccaaagagctggaggccacttttggctgcaggatgagcccagatattaaacaggagcttttgcagtgcaaggcacatctgcacgcaaataaacccctgtctgtgaccgacctcaaggaggtgctggggtgtctctacgaatcccaggaggaggagttagctaaggtggttgtggccccttttaaagagatctctatccatctgactaacacatctgaagtgatgcattgttccttcagcttaaaacattgccaggacttgcagaaactatccctccaggtcgccaaaggggtattccttgagaactatatggacttcgaattggatattgagtttgagaggtgcacttatcttacaatacccaactgggcccggcaagacctgcgctctcttcggctgtggacagacttctgttctcttttcagctctaatagtaatctgaaattccttgaggttaagcagtcttttctgtccgattcttccgtccgaattctctgcgatcatgtgacacggtctacttgtcatttgcagaaggtggagatcaaaaatgtcacgccagacacagcatatcgagatttctgtttagccttcatcggaaaaaagactctcacacacctcacattagctggacacatagagtgggaacgtacaatgatgttgatgctgtgtgatctgttacgaaatcacaagtgcaatctgcaatacttgaggcttggggggcactgcgctacacccgagcagtgggctgagtttttttatgtgcttaaggccaatcagagcctaaagcacctgaggctgagcgccaacgttctgctcgacgagggggctatgctgttgtataagaccatgaccaggccaaagcattttctccagatgttgagcttggaaaactgtcgtctaactgaggctagctgtaaagacctggccgccgtgcttgtggtatctaagaaacttacgcatctgtgcttggccaaaaatcccattggcgataccggagtgaagttcctctgtgaaggacttagctaccccgactgtaagctgcagacccttgtattgcagcaatgttccatcaccaaactgggctgcaggtatcttagcgaggctctgcaggaagcgtgctcgttgacaaatctggatctcagcatcaatcaaatcgcacgcgggctgtggatcctgtgccaagccctggaaaaccctaactgcaatctgaaacacttgcggctatggagctgtagcctgatgcctttttattgccagcatctgggcagtgccctcctatcaaatcaaaaattggaaacccttgacctggggcagaatcacttatggaagagcggaattataaaattatttggcgtgctgcgtcaacgaacagggagtttgaagattctacggctcaaaacgtacgaaaccaacctagaaattaaaaaactgttggaggaggtaaaggagaagaatcctaaacttacaatcgattgcaatgcttccggagcaaccgccccaccctgctgcgactttttctgttag

SEQ ID NO: 344710 - DNA, 3198 bp, Artificial Sequence
  derived and/or modified sequence
atgagcaggaagcaccggctggaggcccggccagacctgcgggagttcttcagcctgaacctgcggagccacaccaggagcaccatgaccagcccccagctggagtggaccctgcagaccctgctggagcagctgaatgaagatgagctgaagagcttcaagagcctgctgtgggccttccccctggaggatgtgctgcagaagaccccctggagcgaggtggaggaggctgatggcaagaagctggccgagatcctggtgaacaccagcagcgagaactggatcagaaatgccaccgtgaacatcctggaggagatgaacctgacagagctgtgcaagatggccaaggccgagatgatggaggatggccaggtgcaggagattgacaaccctgagctgggagatgctgaggaggacagcgagctggccaagccaggagagaaggagggctggaggaacagcatggagaagcagagcctggtgtggaagaacaccttctggcagggcgacatcgacaacttccatgatgatgtgaccctgaggaaccagcgcttcatccccttcctgaaccccaggacccccaggaagctgaccccctacacagtggtgctgcacggccctgctggggtgggcaagaccaccctggccaagaagtgcatgctggactggacagactgcaacctgagccccaccctgcgctatgccttctacctgagctgcaaggagctgagcaggatgggcccctgcagctttgctgagctgatcagcaaggactggccagagctgcaggatgacatccccagcatcctggcccaggcccagaggatcctgtttgtggtggatggcctggatgagctgaaggtgcccccaggggccctgatccaggacatctgtggggactgggagaagaagaagcctgtgcctgtgctgctgggcagcctgctgaagaggaagatgctgcccagggctgccctgctggtgaccacccggccccgggccctgcgggacctgcagctgctggcccagcagcccatctacgtgcgggtggagggcttcctggaggaggacagaagagcctacttcctgcggcactttggagatgaggaccaggccatgagggcctttgagctgatgaggagcaatgctgccctcttccagctgggcagcgccccagctgtgtgctggatcgtgtgcaccaccctgaagctgcagatggagaagggagaagatcctgtgcccacctgcctgaccaggacaggcctcttcctgcgcttcctgtgcagccgcttcccccagggcgcccagctgcggggggccctgcggaccctgagcctgctggccgcccagggcctgtgggcccagatgtctgtgttccaccgggaggacctggagcggctgggcgtgcaggagagtgacctgcggctcttcctggatggagacatcctgcggcaggacagagtgtccaagggctgctacagcttcatccacctgtccttccagcagttcctgacagccctcttctacgccctggagaaggaggagggggaggacagagatggccacgcctgggacattggagatgtgcagaagctgctgtctggagaggagcggctgaagaacccagacctgatccaggtgggccacttcctgtttggcctggccaatgagaagagggccaaggagctggaggccaccttcggctgcaggatgagcccagacatcaagcaggagctgctgcagtgcaaggcccacctgcacgccaacaagcccctgtctgtgacagacctgaaggaggtgctgggctgcctgtatgagagccaggaggaggagctggccaaggtggtggtggcccccttcaaggagatcagcatccacctgaccaacaccagcgaggtgatgcactgcagcttcagcctgaagcactgccaggacctgcagaagctgagcctgcaggtggccaagggcgtcttcctggagaactacatggactttgagctggacatcgagtttgagcgctgcacctacctgaccatccccaactgggcccggcaggacctgcggagcctgcggctgtggacagacttctgcagcctcttcagcagcaacagcaacctgaagttcctggaggtgaagcagagcttcctgagtgacagctctgtgcgcatcctgtgtgaccacgtgaccaggagcacctgccacctgcagaaggtggagatcaagaatgtgaccccagacacagcctacagagacttctgcctggccttcatcggcaagaagaccctgacccacctgaccctggccggccacatcgagtgggagaggaccatgatgctgatgctgtgtgacctgctgaggaaccacaagtgcaacctgcagtacctgcggctgggcggccactgtgccaccccagagcagtgggccgagttcttctacgtgctgaaggccaaccagagcctgaagcacctgcggctgagcgccaacgtgctgctggatgaaggagccatgctgctgtacaagaccatgacccggcccaagcacttcctgcagatgctgagcctggagaactgccgcctgacagaggccagctgcaaggacctggccgctgtgctggtggtgtccaagaagctgacccacctgtgcctggccaagaaccccatcggggacacaggagtgaagttcctgtgtgagggcctgagctacccagactgcaagctgcagaccctggtgctgcagcagtgcagcatcaccaagctgggctgccgctacctgtctgaggccctgcaggaggcctgcagcctgaccaacctggacctgagcatcaaccagatcgcccggggcctgtggatcctgtgccaggccctggagaaccccaactgcaacctgaagcacctgcggctgtggagctgcagcctgatgcccttctactgccagcacctgggcagcgccctgctgagcaaccagaagctggagaccctggacctgggccagaaccacctgtggaagagcggcatcatcaagctgtttggagtgctgcggcagaggacaggcagcctgaagatcctgcggctgaagacctatgagaccaacctggagatcaagaagctgctggaggaggtgaaggagaagaaccccaagctgaccatcgactgcaatgccagcggggccacagccccaccctgctgtgacttcttctgctag

SEQ ID NO: 344711 - DNA, 3198 bp, Artificial Sequence
  derived and/or modified sequence
atgagccggaagcaccggctggaggcccggcccgacctgcgggagttcttctccttgaacctgagatcacacaccagatctactatgaccagcccccagttggagtggactttgcagacccttctagaacagctgaatgaagacgagcttaaatctttcaagagcctcttatgggcatttccacttgaggatgtcctgcaaaaaaccccatggtccgaggtggaggaggctgatggcaaaaaattagccgagatcttggtgaatacctcttctgaaaactggatacgtaacgcgacggttaatattcttgaggaaatgaaccttaccgagttatgcaagatggcgaaggctgagatgatggaggacggccaggtacaagaaattgacaaccctgagttgggcgatgctgaagaagatagcgagctggcaaagccgggcgagaaggaggggtggagaaatagcatggaaaaacaaagcttggtctggaaaaacacattctggcaaggtgatatcgacaacttccatgatgacgtcaccttacggaaccagagattcattccctttctgaacccgaggacacccaggaagctgactccgtatacagtggttttacacggccctgcaggcgtcggtaagaccactttggctaagaagtgtatgcttgattggaccgactgtaatctgagtccgaccttaagatatgccttttatctgagctgtaaggaattgtcccggatgggaccttgtagctttgccgagctcattagtaaggactggccggagctgcaggatgatatcccatcaatcctcgctcaggcacagcgaattctctttgtagtcgacggactggacgagcttaaggtgccgcccggtgccctgatacaggatatatgcggcgattgggagaaaaagaagccagtgcccgttttattgggaagcctgctcaaacggaagatgctgccaagggcagctctgttagttactacgagaccacgggccctgcgagaccttcagctgctggctcaacagcctatttacgtgcgagttgagggttttctcgaagaagaccggcgcgcctattttttgcggcatttcggagatgaagatcaagccatgcgggctttcgagctgatgcgaagtaacgcagccttgtttcagttgggatcagctccagctgtgtgttggattgtctgcacaaccctgaagctacagatggagaagggcgaagaccccgtgcctacatgcttgacgcgtactggcctattcctgcgcttcctctgctcgagatttccccagggcgcccagctgcggggcgccttgcgaaccctgtcactccttgccgcccagggcctttgggcccagatgtcagtctttcaccgggaggacttggagcggctgggggtgcaggaatcagaccttcggctgtttctggacggcgatattcttcgccaggacagggtatccaaaggctgttatagctttatacatctgtcttttcagcagtttttgactgcactgttctacgccctggaaaaagaagagggcgaggatcgggacggtcatgcctgggatattggcgacgtccagaagctcctatctggggaggagcgccttaagaaccccgacctgattcaagtcggccactttttgtttggcctggcgaatgagaaaagggccaaagaactcgaagccacgtttggctgcaggatgtcccctgacattaagcaggaactcctccaatgtaaagcacatctgcatgccaacaaaccattgagcgtaactgaccttaaggaggtgctgggctgcctatacgaatcccaagaggaagagcttgccaaagtggtcgttgccccatttaaagagatctccatccatctcaccaatacatctgaagtgatgcactgttccttcagcctaaagcactgccaggatctgcagaaactgtccttgcaggtcgccaagggcgtgttcctcgaaaactatatggactttgagcttgatattgagtttgaacggtgtacttatctcaccattcccaattgggctagacaggatctgcgttccctgcggctttggacagacttttgttcgctctttagctccaacagtaatctcaagttccttgaagtgaagcaatcatttctgtcagactccagcgtgcggatcctgtgcgatcacgtaactaggagtacatgccaccttcaaaaagtagaaatcaaaaacgtgacccccgacacagcctacagggacttctgtctggccttcattggtaaaaagaccctcacacacctgactctggctggacacatcgagtgggaacgcacaatgatgctgatgctgtgtgaccttctccgtaaccataagtgcaatctgcaatacctcaggttgggtggccattgcgctacccccgagcagtgggctgaatttttctacgtgctaaaggcgaatcagtctctgaagcacctgagactgtctgcaaatgtgctcctggacgagggggctatgctgttgtataagacaatgacaagaccaaagcacttccttcagatgctatcactggagaactgccggctgactgaagctagttgcaaggacctggctgctgtattggtcgtaagcaagaaactgacccacctgtgcctcgcaaaaaaccctataggtgatactggcgtgaaatttctatgcgaaggactgagctaccctgactgcaagttacagaccctggtcctgcaacagtgttccattacgaagttgggttgtcgctaccttagcgaagcactccaggaggcttgtagcctcacaaacttggacttgagtattaatcaaattgcgaggggcttgtggatcctctgtcaggccctggagaatccaaattgcaatctcaaacatttgagattgtggtcgtgcagcctcatgccgttctactgtcagcacctcggcagtgctctgctgagcaatcaaaaactcgagaccctcgatctcgggcagaatcatctatggaagtcggggattataaagcttttcggcgtgctcaggcagaggaccggatctctgaaaatcttgaggctgaaaacttacgagaccaacctcgagatcaagaagttactggaagaggtaaaagagaaaaaccccaagctgacaatcgactgcaatgctagtggtgccacagctcccccatgctgcgattttttttgttag

SEQ ID NO: 344712 - DNA, 3198 bp, Artificial Sequence
  derived and/or modified sequence
atgagccggaagcaccggctggaggcccggcccgacctgcgggagttcttctcattaaacctgaggagtcacacccgctctacgatgacttcacctcagctagagtggacactgcagaccctgcttgaacaactcaacgaagacgaattgaaatctttcaaatctcttctttgggcattccccctggaggacgtgttgcagaagaccccctggtccgaagtggaggaagccgacggtaagaaactggccgagattctggtgaatacctcatctgagaattggattcggaatgctaccgtgaatatccttgaggaaatgaatctgacagagctctgcaaaatggctaaagcagaaatgatggaagacgggcaggtacaggagatagacaatcctgagttgggtgacgcagaagaggactcagaactggctaaacctggagagaaggaaggatggagaaactccatggaaaaacagtctctggtgtggaaaaacacattctggcagggcgatatcgacaactttcatgatgatgtgactcttcggaaccaacggtttatcccattcctgaacccacgcacccccaggaagctgacaccttacaccgttgtcctgcatggaccggccggggtcggcaagactacactggccaagaaatgtatgctggactggactgactgcaacttgtcacctactctcaggtacgcattttaccttagctgtaaggagctgagcagaatgggcccctgcagtttcgctgaactgatctctaaggactggccggagctgcaggatgacattccaagcattctggcccaggcccagaggattttgtttgtggttgatggactcgatgagctgaaggtacctcctggagctctgatccaggacatctgcggagattgggagaagaagaagcccgtgcctgtgttacttggttctctcctcaaaaggaagatgctccctagggcggccctgctggttactacaaggcctcgcgccttacgcgacttgcagctgctggcacagcaacccatctacgttagggtggaaggattcttagaagaagataggagagcctacttcctgaggcatttcggcgatgaagaccaggccatgcgggcatttgaactgatgcggtccaacgcagcactattccagttggggtccgcccccgcggtctgctggattgtgtgcaccactctgaagctgcaaatggagaagggggaggacccagtgcctacctgtctcacacggaccgggctcttcttaaggtttctgtgctcgagattccctcagggagcccagctgaggggagcactgagaaccctgagcctgctcgccgcccaagggctgtgggctcagatgtcagtcttccatagggaagaccttgaacgtttgggggtccaggagagcgatctaaggctgtttcttgatggcgacattttaaggcaggacagggtaagtaagggatgctactctttcatccatctttcttttcaacagttcctgaccgccctgttctacgccctcgagaaagaggagggagaggacagagacggacacgcttgggatatcggagacgtccagaagctgttatctggtgaggagagacttaaaaatccagacctcatccaggttggacattttctctttggcctagccaatgagaaacgggctaaggagctggaggctactttcggctgtaggatgtctccagacatcaagcaggagctgctgcaatgtaaggcacacctgcacgccaataaacccctgtcagtgactgatctgaaggaagtcttaggatgtttatacgaaagtcaggaggaggagttggctaaggtcgttgtcgcgccgtttaaagagatcagtatccacttgacgaatacgtctgaggttatgcattgctccttctcattgaaacactgtcaggacctccagaagttgtctctacaagtagccaaaggagtatttctggaaaactatatggacttcgaactggacattgagttcgagcgctgtacttatctcacaattcccaactgggctaggcaggaccttcgctccttgaggctgtggaccgatttctgcagcctcttttcgtctaactccaatttaaagtttttagaggtgaagcagagtttcttgagcgatagcagcgtaagaattctgtgtgatcatgttactaggagcacatgtcacttgcagaaggtggagatcaaaaacgttaccccggacacagcatacagagatttttgccttgccttcatcggaaagaaaactttgacccacctgacgttagcagggcacattgaatgggagaggacgatgatgctgatgttatgcgacctactgcggaaccataaatgtaacctgcagtatctgcgcctcgggggacattgtgctactcctgaacagtgggccgagtttttttatgtgctcaaggccaaccaatctttgaaacatctaaggcttagtgcaaacgtacttctggacgaaggagcaatgctgctgtataaaaccatgacacgccctaaacacttcctgcagatgttgagtttggaaaactgtcggctaaccgaagccagctgtaaagatctggccgcagtgcttgtagtcagcaagaagctgacacacctgtgcctagctaaaaatcctataggagacactggcgtcaagtttttgtgtgaggggctctcctatccagattgcaaactgcaaaccctggtgctgcagcagtgcagcataacaaaactgggttgtaggtacctgtcggaggccctgcaggaggcctgttcactgacaaaccttgacttatcaatcaaccagattgcccgtgggctgtggattctctgccaggcgctcgagaatcctaattgcaacctgaagcacctaagactctggagctgcagtttaatgcctttttattgccagcacttaggaagtgcgctactttccaaccaaaagctggagactctggatctaggacagaatcatctgtggaaatccggtatcatcaaattgtttggcgtgctgcgccagaggacgggcagcctgaagatcctgcgtctcaagacttacgagactaacttggagattaagaaattgctcgaagaagttaaagagaagaaccccaagttgaccatcgactgcaatgcctctggtgctacagcaccaccttgctgtgatttcttttgctag

SEQ ID NO: 344713 - DNA, 3198 bp, Artificial Sequence
  derived and/or modified sequence
atgagccggaagcaccggctggaggcccggcccgacctgcgggagttcttttctctgaatctgcgcagccacaccaggtcgaccatgacaagcccccagctggagtggactctgcagaccctgctcgagcagctgaatgaagacgagctcaaaagcttcaagtccctactgtgggcgttccctcttgaggacgtactgcagaagactccctggtctgaagtcgaagaagccgatgggaaaaagctggcagagattcttgttaacacctcctctgaaaattggatccgaaacgcaaccgttaatattttagaagagatgaatctcaccgaactatgtaaaatggcgaaagcagagatgatggaggacggccaggtccaggagatcgacaatcccgaacttggcgatgcagaggaggacagtgagctcgctaaaccaggtgagaaggaggggtggaggaattccatggaaaaacagtcactggtctggaaaaacacattctggcaaggggatattgataattttcatgacgatgtgacgctccgaaaccagaggtttattccttttctgaacccacgaactccccggaagctgacaccctacaccgtggtgttgcatggaccggcgggcgtcgggaagacaacgcttgccaagaagtgtatgctggactggacagactgcaatttatctcctactctccgatatgcattttacctctcgtgcaaggaactatccaggatggggccttgcagctttgcagagctgatttctaaagactggcctgaactgcaagatgacataccttcaatcctggcccaagcacaacggattctgtttgtggttgacggcctggatgagctgaaagttcccccaggcgccttgatacaggatatctgcggcgactgggagaagaagaaacccgtgcctgttctactaggatctctcctgaagagaaagatgttgccgcgagccgccctgctggtcacaactagaccgcgggctctgagggacttacagctcttggcccaacagccgatctacgttcgagtggaaggatttctcgaagaggaccgccgagcttattttctccgccatttcggagacgaagatcaagctatgagggcttttgagttgatgagatccaacgccgccctttttcagctgggatctgcacctgccgtttgctggattgtttgcactaccctgaagctgcagatggagaagggtgaggaccctgtgcccacatgtctgacccggacaggactcttcctgcggttcctctgctctcggttccctcagggtgcccagctgaggggcgcactccggaccctgagcctgctcgcagctcagggtctctgggcccagatgtctgtttttcatagggaggatctggaacgtctgggagttcaggaatccgacctgcgtctgtttctggacggggatattctgagacaagatcgggtgtcaaaggggtgttactctttcattcatctctcattccaacaatttctgacagcactcttctatgcactcgagaaggaggaaggcgaagatcgcgacggtcacgcatgggacattggggatgtacaaaagctcttgagcggagaagagaggctcaagaatcctgacttgattcaggttggacattttttgtttggactcgccaacgaaaaacgggcaaaagagctcgaagcaacgttcggatgtcgaatgagtcccgacatcaagcaggaattgctgcagtgcaaggctcacctacacgctaataagccactgtctgtgactgatctcaaagaagtcctgggctgtctctatgaatcacaggaagaagagctcgccaaagtggtagtagcccccttcaaagagatctccattcatctaacaaatactagcgaagtgatgcattgctctttttccctgaagcactgccaagatctccagaaactgtccctgcaggttgcaaaaggcgtgttcctcgaaaactatatggactttgagctggacatcgaattcgaaagatgtacatacttgactataccaaactgggcaaggcaggatttgcgctcactaaggctgtggaccgacttttgttcattattttcttctaatagcaaccttaagttcctggaagtcaagcagagcttcctgagcgactccagcgtccgaatactatgtgatcacgtgactaggagcacctgccatctccagaaggttgaaatcaagaacgtgaccccagataccgcatacagagatttttgtctggcctttataggcaagaaaactctgacccatctgaccctagcaggccatatcgaatgggagaggacaatgatgttgatgctctgtgatttattgagaaaccacaagtgtaacctgcagtacctgagactcgggggccactgcgccactcccgagcagtgggctgagttcttttatgtgctgaaggcgaaccaaagcctgaagcacctgaggctttctgccaatgtgctcttagatgagggcgcaatgctcctgtataagaccatgacaagaccaaagcacttcctgcagatgctcagtctggaaaactgtaggctcacagaagcatcctgtaaagacttggccgccgttctggttgtgtcaaaaaagctgactcacttgtgtctggctaagaaccctatcggagataccggtgtgaagttcttgtgcgaaggtcttagctatccagattgcaaattgcagaccttggttctacagcagtgttccattaccaagttgggctgccggtacctgtctgaagcattgcaggaggcctgctcactgacaaacctggaccttagcataaaccaaattgctagaggactgtggatcctgtgccaagccctggagaatcctaactgcaacctgaaacacctccggctctggagctgcagcttaatgcccttttattgtcagcatctcggctcggccctcctgagtaatcaaaagctggagacacttgacttgggccagaaccatctctggaagtccggcattatcaagcttttcggagtgctgcgccagagaaccggatcattaaagatactacggcttaaaacttacgagacaaatctggaaattaaaaaattgttagaggaagtgaaggaaaagaatccaaaattgactattgattgtaacgcatctggcgccacagcaccgccttgttgcgatttcttttgctag

SEQ ID NO: 344714 - DNA, 3198 bp, Artificial Sequence
  derived and/or modified sequence
atgagccggaagcaccggctggaggcccggcccgacctgcgggagtttttctccttgaacttgcgctcacatacgagatccaccatgacttctccacagctggagtggacactccaaaccctgctggagcagctgaatgaagatgaactcaagagcttcaaaagcttgctgtgggcttttccattggaggacgtgctccagaagacaccctggtcagaggttgaagaagcagatggcaaaaaactggccgagatcctggtgaacaccagctcagagaactggatacgaaacgccaccgttaacatcctggaagagatgaatctcacagagctttgcaagatggccaaggctgaaatgatggaagacggccaggtacaggaaatcgataaccctgaactgggtgatgccgaggaggactctgaattggccaaacctggagaaaaggagggctggcgaaactcgatggaaaagcaatcactggtctggaaaaatacattttggcaaggagatatcgacaattttcacgacgacgtgacactaagaaatcagaggtttattccctttttaaacccacggacaccccgtaagctgaccccctacacagtggtcctgcatggccctgcgggcgttggaaagactactctagctaagaagtgtatgctggattggacagactgtaaccttagtcctaccctcaggtacgccttttacctgtcctgtaaggagttgtcacgcatgggaccttgttcattcgccgaattaatttctaaagactggcctgagttacaggacgatattccttccattctcgctcaggctcaacggatcctgttcgtggtggatggcctggacgagctgaaggtcccaccgggggcgcttattcaagacatctgcggggactgggagaaaaaaaagcctgtacctgtgcttttgggcagtttgttaaagagaaaaatgttgccaagggcagctcttttggtgaccacacgccctagggccctgagggatttgcagctactggctcagcagccaatctacgtccgggtggaaggctttcttgaggaagatcgaagggcatattttctgagacactttggtgatgaggaccaggcaatgcgggcctttgaattaatgagatctaatgccgccctgtttcagctcggttcagcccctgcagtatgctggatcgtgtgtaccacgttgaaactgcagatggagaaaggcgaagaccccgttcctacatgtcttactagaacaggcctgttcctgcgtttcctatgctcgcgcttccctcagggcgctcaactccgaggggcactgagaactctcagtctgctggctgcacaaggtctgtgggcccagatgtcagtgttccatcgggaggatctcgagcgcctaggggtacaggagtccgacctgagattatttcttgacggggatattctcaggcaagacagggtgagcaaaggctgttactcatttatccacctgtccttccagcagtttctgactgcactgttctacgcgctggagaaggaagagggcgaggacagagacggccacgcctgggacattggtgacgtacagaaacttttgtccggtgaagagcgcctgaaaaacccagacctgatccaggtgggccattttttgttcgggctcgctaatgagaaacgggctaaagaactcgaagcgactttcggttgccgaatgagccctgacattaagcaagagttactgcagtgtaaggcacaccttcacgcgaataagccattgtcagttacagacctgaaggaagtgttaggatgcttgtatgagagtcaagaagaggagctcgctaaggtcgtcgtagcaccctttaaagagattagtatccatctcacaaacaccagcgaagtgatgcattgctccttttcccttaagcattgccaggacctgcagaaactcagccttcaggtcgccaagggggtgttcctggagaattacatggactttgagctggacattgaatttgaaagatgcacatacctaactattcctaattgggcaaggcaggacctcagatccctgaggctctggaccgatttttgttccttgttctcgtccaatagcaatctgaagtttctcgaagtcaagcagtcatttctgtcagactcctcggttcggatattatgtgaccatgtgactcgaagcacctgccacctgcaaaaggtggaaattaagaatgtcacgcctgacactgcttatagggacttctgtctcgcctttataggaaaaaagacgctgacgcatcttacactagctgggcatatcgaatgggagcgaactatgatgctcatgctatgcgatctgctgcgcaaccacaagtgtaacttacaatacttacgcctcggcgggcactgtgccacccccgaacaatgggccgaattcttctacgtgctgaaagcgaatcagagcctgaagcacttaaggctcagcgccaacgtgctactcgacgagggcgccatgctactgtacaagacaatgacaaggccaaaacactttctccagatgttgagtctagagaactgcaggctcaccgaagcatcttgtaaggatttggccgcggtgctcgtagtatccaagaaactcacccacctgtgtctggcgaaaaatcctatcggcgacaccggtgtcaaatttctctgcgaagggctgtcctacccggactgcaagctccagactttagtccttcaacagtgttctattactaaactggggtgtcgatacctgagcgaagcgctccaggaagcatgtagcttaaccaacctggatctttcaatcaaccaaattgcgcgcgggctgtggatactctgtcaggcactggaaaaccccaattgcaacctgaagcatctccgcctgtggtcctgcagcctgatgcctttctactgccagcacctcggatcagcactgctgagtaatcagaagttggagactttggatctcggacagaatcacttgtggaagtctgggatcatcaaactgttcggtgtgctccggcaaagaactggcagtctcaaaattttgaggcttaaaacatatgagactaatctggagatcaagaagctattggaagaggttaaggagaaaaatcccaaactaactatcgactgcaatgccagcggcgcgacagctccgccttgttgcgacttcttttgttag

SEQ ID NO: 344715 - DNA, 3198 bp, Artificial Sequence
  derived and/or modified sequence
atgagccggaagcaccggctggaggcccggcccgacctgcgggagtttttctcccttaacctaaggtcccacacacggtccaccatgactagcccccagttagaatggacgttacagactctcttggaacagttaaatgaggatgaactgaagagctttaagtcgttactgtgggctttccccctcgaggacgtgttgcaaaagacaccatggagcgaagtggaggaggcggacggtaagaaattggccgagatccttgttaatacatcaagcgaaaattggattcgtaatgccaccgtgaatatcctcgaagaaatgaatcttacggagctgtgcaagatggcaaaggctgagatgatggaagatggccaggtgcaggagatagacaacccggagcttggcgacgccgaagaggattccgagctggcaaaacccggtgagaaagagggctggcggaactctatggagaaacaatctctggtatggaaaaacactttctggcagggagacattgacaacttccacgacgacgtgaccctgcggaatcaaaggtttatcccctttctcaatccgaggaccccaagaaagctgacaccctacacggtagttcttcatggacccgcgggagtgggcaaaactactctcgcaaaaaaatgtatgctggattggacagactgcaatctgagtcccacacttagatacgcattctatctgtcctgcaaggagttgagccggatgggcccatgcagctttgccgaactgataagtaaagactggccagagttacaggacgacatcccctccattttggcccaggcccagaggatcctgtttgtggtggacgggctggatgagcttaaggtaccacctggagctctgatccaagatatctgcggcgattgggagaagaaaaaacctgtccccgtgctgttgggatcccttcttaaaaggaagatgctgcctcgcgctgccctattggttacaacaaggcctcgggccctgagagatcttcagctgctcgcacagcagccaatttatgtccgcgtggaaggttttttggaggaggatagacgcgcttacttcctgcgccatttcggcgatgaggatcaggcaatgagagccttcgagctgatgagatctaatgcagctctgtttcagttagggtccgccccagcagtctgctggatcgtgtgcactacgctgaagctgcagatggaaaagggagaagatccagtgcccacgtgccttacaaggacagggttattcctgagatttctttgctcgaggtttccacaaggggctcagctgaggggtgctctgcgaaccctctccttgctggcagcccaaggcttatgggcccagatgagcgtgttccaccgggaggatctcgaaagattgggcgtccaggagtcggatctcagactgttccttgacggggatatcttgagacaggaccgcgtgagtaagggctgctactctttcatccacctttctttccagcaatttctcacagccctattttatgccctggagaaggaagagggtgaagacagggatggacacgcgtgggatattggtgacgtgcagaagttactatctggagaagaacgactgaagaatccggatcttattcaagttggccactttttattcggcctggccaacgagaaacgagcaaaagagctggaagccacttttggctgcaggatgtcaccagatatcaaacaggagctgcttcagtgtaaagcacacctccacgccaacaaaccacttagcgtgactgacttaaaggaagtgcttggatgcctgtacgagagtcaggaggaggagttggccaaagtggtcgttgccccctttaaagaaataagcatccacctgactaatacaagtgaagtaatgcattgctccttcagtttgaagcactgtcaggacctgcaaaaactctctctccaggttgcgaaaggagtgttccttgagaactacatggactttgaactcgacattgagtttgaaagatgtacctacttgaccatacctaactgggccaggcaagacctgaggtcccttcgactgtggactgacttctgcagtttatttagttccaacagtaatttgaaatttcttgaggttaagcagagcttcttatcagatagcagcgttcgcatcctgtgtgatcacgtgactcgctcgacctgccacctccaaaaggtggagattaagaatgtaacccctgatacagcctaccgtgatttttgtcttgccttcatcggcaaaaagacacttacccatttaaccctggcgggtcatatcgagtgggagcgaactatgatgttgatgttgtgtgatcttttgagaaaccacaagtgcaacctacagtacctgagacttggtggacactgcgccactccagagcagtgggcggaattcttctatgtgctcaaagccaatcaatcactgaaacacctgagactgagcgccaacgtgctcttagacgagggcgctatgttgctgtacaagaccatgacccgcccaaagcactttctgcagatgctgtccctggagaactgccgcctgacagaagcttcttgtaaggacctggccgctgtgctcgtcgtttcaaaaaagcttacacacctgtgcttggccaaaaacccaatcggggacaccggagtcaagtttctgtgcgagggcctcagctatcccgattgcaaactccagactcttgttcttcagcaatgttctattaccaagttaggatgtcggtatctgtcagaagccctacaagaagcctgctccctgactaaccttgacctctctattaatcagatcgccaggggactgtggatcctttgtcaggccttggaaaacccaaattgtaacctgaaacacctgaggctctggtcttgttcactgatgcccttctactgtcaacatctgggctccgctttgctgtccaatcaaaaactggaaacactcgacctgggacagaaccacttgtggaagtcgggcattatcaaactcttcggcgtgctccggcaacgcacaggctccctcaagatcctgagactgaagacttatgaaacgaacttggagattaagaaattgctggaggaagtgaaggaaaagaaccccaaactgactattgattgcaacgccagtggcgctaccgcaccaccttgctgtgactttttttgctag

SEQ ID NO: 344716 - DNA, 3198 bp, Artificial Sequence
  derived and/or modified sequence
atgagccggaagcaccggctggaggcccggcccgacctgcgggagttcttttctctgaacctaaggtcacatacccgaagtaccatgaccagtccccagttggagtggaccttacaaactttactggagcaactgaatgaggacgagctcaaatcctttaaatctcttctgtgggcttttcccctggaagatgtcctccagaaaaccccctggtccgaggtcgaggaggccgatggtaagaaacttgcagaaattttagtcaatacatcatcggaaaactggatcagaaatgcgacagtgaatatcttagaagagatgaatctgacagagctctgcaagatggcaaaagcagaaatgatggaggacggccaggtgcaggagattgataatccagaactgggagatgccgaggaagattctgagctggcaaagccgggagagaaagaagggtggcggaactccatggaaaagcagtctttggtgtggaaaaatactttctggcagggcgacattgacaattttcacgatgacgtgacactcaggaaccagaggttcattcctttcctgaacccaaggacccccagaaagcttacaccatatacagttgtccttcacggaccggcgggggttgggaagactacgttagccaagaaatgcatgttggactggaccgactgcaatctatcaccaactctgaggtacgctttctatttgtcttgtaaagagttgagccgcatggggccgtgctctttcgcggaactgatttcaaaagactggcctgagctccaggacgacatacccagtatcctggctcaagcgcaacggatactgttcgtcgtggatggattagatgaactaaaggttccacctggtgctctgatccaggatatctgcggcgactgggagaagaagaaacctgttccagttttgctgggatcgctgctgaaacggaagatgttgccacgggctgccttgctggtgactaccaggccacgggcactaagggacctgcaactgcttgcccagcagcctatctatgtgagagttgagggattcctggaggaggacagacgcgcttattttttgcgccattttggtgatgaggatcaggccatgcgcgcgtttgagctgatgcgatctaacgcagcacttttccagctcggtagcgcccccgccgtgtgctggattgtgtgcacgacactgaagctgcagatggaaaagggcgaggatccagtgcccacatgcttgacacggaccggattatttctgcggttcttatgttcccggtttccgcagggcgcacaactgcgcggcgcccttcgaaccctgagccttctcgccgcccaaggcctatgggctcagatgagtgtttttcatcgcgaggatctggaaaggctcggcgttcaggaatccgatctgaggctgttcctggatggagacattctgcggcaggaccgagtgagcaagggctgctatagttttattcatctctcatttcagcagttcctcaccgctctgttctatgccctggagaaggaagagggtgaagaccgagacggccacgcttgggatatcggagatgtgcagaaactgctgtctggcgaggagcgccttaaaaaccccgatctaattcaggtcggacactttctcttcggtcttgctaacgagaaacgcgctaaggagttagaagccacatttggatgtagaatgtctcccgacataaaacaagagctgctgcagtgcaaggcccacttgcacgctaataagcctctgagcgttactgatctgaaggaggtcctcggatgtctgtacgagtctcaggaagaagagcttgctaaggtagtcgttgcccccttcaaagaaatcagcatccaccttaccaacacctccgaggtcatgcattgttctttctcactgaaacattgtcaggacttgcagaagctgtccctgcaggtggcaaagggagtgttcctggagaattacatggactttgaactcgatatagagttcgagcggtgcacatacctcacaatccctaactgggcaaggcaggacctgcgatcattacgtctgtggaccgacttttgttccctgttttcctcaaactctaacctgaagttcctggaggtcaagcagtcttttctatctgattcctcagtccgtatcctgtgcgatcacgtgactcgatcgacctgccacctgcagaaggttgaaattaagaatgtgacccctgatacggcctacagggatttttgtctcgctttcattggcaagaagacactcacacatctaaccctagctggacatatcgaatgggaacgcactatgatgttgatgttgtgcgatcttcttcggaatcacaagtgtaaccttcagtatctgagactgggaggacattgcgcaactcctgaacagtgggcagagttcttctatgtccttaaggccaatcagtcattaaaacatttgaggttaagcgccaatgtacttctcgacgaaggagccatgctgttatataaaacaatgacacggccaaagcatttcttgcaaatgctttcccttgagaattgcaggctgaccgaggcttcgtgtaaggatttggcagctgtattggtcgttagcaagaaactcacacacctatgtcttgccaagaatccaataggcgacacaggtgttaaatttctgtgtgaaggccttagctacccagactgtaagctgcagacactggtgctgcagcagtgctccattactaagctgggctgtaggtacctctctgaagccttgcaggaggcatgtagtctaactaacctggatctgagtattaatcagattgcccggggtttatggatcttgtgccaggccttagagaacccaaactgcaatctgaagcatctgcgtctttggtcctgtagcctcatgccattctattgccagcaccttggctcagccctactgagcaaccaaaagctagaaacgctggatttagggcagaatcacctgtggaaaagcggtatcatcaaactgttcggggtgctgcgtcagcgcacgggaagtttgaagattctaaggctgaagacatacgagactaacctagaaatcaaaaaactgctcgaagaagtgaaagaaaagaaccccaagctcaccatcgattgcaatgctagcggcgctacggcccccccctgttgcgatttcttctgttag

SEQ ID NO: 344717 - DNA, 3198 bp, Artificial Sequence
  derived and/or modified sequence
atgagccggaagcaccggctggaggcccggcccgacctgcgggagttctttagcttaaatctccgtagtcatactaggtccaccatgacgagcccccagctggagtggacattacagaccctattagagcagctgaatgaggacgagctgaagagctttaagagtctgctatgggcgttcccattagaagacgtgttgcagaaaacaccatggtctgaggtagaggaggccgacggtaaaaagctagcggagatccttgtgaacacaagctcagagaactggattcgaaatgccaccgtaaatatcctggaggagatgaatctgacggagctgtgtaagatggccaaggccgagatgatggaagacggtcaagtgcaggagattgacaaccctgagctgggagatgcagaggaggactcagagttagcgaagcccggagagaaggagggctggcggaacagcatggagaagcagagtctggtttggaaaaacactttctggcaaggcgatattgacaattttcacgacgacgttaccttacggaatcagaggtttattccattcctgaaccccaggaccccacgtaagctcacaccatacacagttgtgctgcatggacctgctggggtcggaaagactacgcttgccaagaaatgcatgttggactggacagattgtaacctgtcccccaccctcagatatgccttttacctcagttgtaaggagttgagcaggatgggaccctgcagctttgcagaactaatcagtaaagattggcccgagttgcaggatgatattcccagcatacttgcccaagctcagcgtattttgtttgtggtggatggactggacgagctcaaagtgccacccggcgcgctgatccaggacatatgcggagactgggaaaagaagaaaccagttcccgtgctgctgggtagtctcctgaaaagaaaaatgctccccagggctgcactactcgtcactacacggcctagggcgcttcgtgacctccaattgctggctcagcagcctatatatgtgcgggtcgaagggtttctggaagaagatcgacgtgcatattttctcaggcactttggggatgaggaccaggctatgcgtgcctttgaactgatgaggtccaacgccgctttgttccagctgggctctgcacctgctgtgtgctggattgtgtgcacaaccttgaagctccagatggagaagggagaagatcccgtccctacatgtcttactcgcaccggcctattcctccgcttcctttgctccaggtttccacagggtgcccagttgcggggcgcactccgtacactgagtttgctcgctgctcagggcctatgggcccagatgagtgttttccacagggaggatctagaaagactcggagtgcaggagagcgacctgcgactgtttctcgatggcgatatcctccgccaggaccgcgtctccaaaggttgctattcctttatccatctgtcattccagcaattcctcaccgcccttttttatgcactggaaaaggaagagggggaggatagggacggccacgcgtgggacattggtgacgtgcagaaactgttgtccggcgaggagaggctgaagaatcctgatctcatacaggtcggtcacttcctttttggactcgctaatgagaaacgagccaaagaacttgaggctacttttggatgtcgtatgagtcctgacatcaagcaggaactgttacagtgcaaggcccacttacatgctaacaagcctcttagcgtcacggacctgaaggaagtactcggctgcctctacgaaagccaagaagaggagttagccaaagttgtcgtggctccattcaaggagatttccattcatctgacaaacacctctgaggtcatgcattgctcttttagtttaaaacactgccaggaccttcaaaagctaagcttacaggttgctaaaggcgtctttctggagaactatatggactttgaactggacatcgagttcgagcgatgcacctatctgaccatccccaactgggccagacaggatttgaggtctctccgcctgtggacagacttctgcagcctcttctctagcaactctaatctcaagttccttgaagtcaaacaaagcttcctgagcgacagttcagtacggatcctctgtgaccacgtgacccgttcgacttgccatctgcagaaagtggaaatcaaaaacgtcaccccggatactgcctaccgcgatttttgtcttgccttcattgggaaaaagaccctaactcacctcaccttggccgggcacattgagtgggaacggaccatgatgctgatgttgtgcgatctgttacgaaaccacaagtgtaacctgcaatatctgaggcttgggggccattgtgccacacccgagcagtgggccgaatttttctatgtgctcaaagcaaaccagtcactcaaacatcttaggctcagcgcaaatgtcctgctggacgagggggctatgctcctgtataaaacaatgacccgaccaaaacacttcttgcagatgctgtctctggagaactgccgcttaacagaagcctcctgcaaagatctggccgcggttttagtggtttccaaaaagttgacccacctatgtctcgccaagaatccaattggagacactggcgtcaagtttctgtgcgagggcctgagctatccagactgcaaactgcaaactttggtgctgcagcagtgctccataacaaaactcgggtgccggtacctctctgaagcgctgcaagaggcttgcagcctgaccaacctcgacctttccataaatcaaattgctcggggattgtggattctttgccaggctctggaaaatcccaattgtaatctaaaacacctgagactgtggtcgtgttctttaatgccattctattgtcaacacctcggttccgctctgttgagcaatcaaaaattagaaactcttgatctgggccaaaaccatttgtggaaaagtggcataatcaaattgttcggagtgctgcgacagcgaaccggatccctcaaaatcctacgcttgaagacctacgagaccaatctggagatcaaaaaactgctggaggaggtgaaagaaaagaaccctaagctaaccatcgactgtaatgcctcaggcgccaccgcgccaccatgttgcgatttcttctgctag

SEQ ID NO: 344718 - DNA, 3337 bp, Artificial Sequence
  derived and/or modified sequence
gaaacacaggctggaagcaagacctgacctgagggagttcttcagccttaacctaaggtctcatactcggagcactatgacatcgccccagctagagtggactctgcagacccttctggagcagctgaacgaggatgaattaaagagtttcaaatcccttttatgggcttttcccctcgaagacgtgctacagaagaccccatggtctgaggtggaagaggctgatggcaagaaactggcagaaattctggtcaacacctcctcagaaaattggataaggaatgcgactgtgaacatcttggaagagatgaatctcacggaattgtgtaagatggcaaaggctgagatgatggaggacggacaggtgcaagaaatagataatcctgagctgggagatgcagaagaagactcggagttagcaaagccaggtgaaaaggaaggatggagaaattcaatggagaaacagtctttggtctggaagaacaccttttggcaaggagacattgacaatttccatgacgacgtcactctgagaaaccaacggttcattccattcttgaatcccagaacacccaggaagctaacaccttacacggtggtgctgcacggccccgcaggcgtggggaaaaccacgctggccaaaaagtgtatgctggactggacagactgcaacctcagcccgacgctcagatacgcgttctacctcagctgcaaggagctcagccgcatgggcccctgcagttttgcagagctgatctccaaagactggcctgaattgcaggatgacattccaagcatcctagcccaagcacagagaatcctgttcgtggtcgatggccttgatgagctgaaagtcccacctggggcgctgatccaggacatctgcggggactgggagaagaagaagccggtgcccgtcctcctggggagtttgctgaagaggaagatgttacccagggcagccttgctggtcaccacgcggcccagggcactgagggacctccagctcctggcgcagcagccgatctacgtaagggtggagggcttcctggaggaggacaggagggcctatttcctgagacactttggagacgaggaccaagccatgcgtgcctttgagctaatgaggagcaacgcggccctgttccagctgggctcggcccccgcggtgtgctggattgtgtgcacgactctgaagctgcagatggagaagggggaggacccggtccccacctgcctcacccgcacggggctgttcctgcgtttcctctgcagccggttcccgcagggcgcacagctgcggggcgcgctgcggacgctgagcctcctggccgcgcagggcctgtgggcgcagatgtccgtgttccaccgagaggacctggaaaggctcggggtgcaggagtccgacctccgtctgttcctggacggagacatcctccgccaggacagagtctccaaaggctgctactccttcatccacctcagcttccagcagtttctcactgccctgttctacgccctggagaaggaggagggggaggacagggacggccacgcctgggacatcggggacgtacagaagctgctttccggagaagaaagactcaagaaccccgacctgattcaagtaggacacttcttattcggcctcgctaacgagaagagagccaaggagttggaggccacttttggctgccggatgtcaccggacatcaaacaggaattgctgcaatgcaaagcacatcttcatgcaaataagcccttatccgtgaccgacctgaaggaggtcttgggctgcctgtatgagtctcaggaggaggagctggcgaaggtggtggtggccccgttcaaggaaatttctattcacctgacaaatacttctgaagtgatgcattgttccttcagcctgaagcattgtcaagacttgcagaaactctcactgcaggtagcaaagggggtgttcctggagaattacatggattttgaactggacattgaatttgaaagctcaaacagcaacctcaagtttctggaagtgaaacaaagcttcctgagtgactcttctgtgcggattctttgtgaccacgtaacccgtagcacctgtcatctgcagaaagtggagattaaaaacgtcacccctgacaccgcgtaccgggacttctgtcttgctttcattgggaagaagaccctcacgcacctgaccctggcagggcacatcgagtgggaacgcacgatgatgctgatgctgtgtgacctgctcagaaatcataaatgcaacctgcagtacctgaggttgggaggtcactgtgccaccccggagcagtgggctgaattcttctatgtcctcaaagccaaccagtccctgaagcacctgcgtctctcagccaatgtgctcctggatgagggtgccatgttgctgtacaagaccatgacacgcccaaaacacttcctgcagatgttgtcgttggaaaactgtcgtcttacagaagccagttgcaaggaccttgctgctgtcttggttgtcagcaagaagctgacacacctgtgcttggccaagaaccccattggggatacaggggtgaagtttctgtgtgagggcttgagttaccctgattgtaaactgcagaccttggtgttacagcaatgcagcataaccaagcttggctgtagatatctctcagaggcgctccaagaagcctgcagcctcacaaacctggacttgagtatcaaccagatagctcgtggattgtggattctctgtcaggcattagagaatccaaactgtaacctaaaacacctacgcctctggagctgctccctcatgcctttctattgtcagcatcttggatctgctctcctcagcaatcagaagcttgaaactctggacctgggccagaatcatttgtggaagagtggcataattaagctctttggggttctaagacaaagaactggatccttgaagatactcaggttgaagacctatgaaactaatttggaaatcaagaagctgttggaggaagtgaaagaaaagaatcccaagctgactattgattgcaatgcttccggggcaacggcacctccgtgctgtgactttttttgctgagcagcctgggatcgctctacgaattacacaggaagcgggattcgggtctctaagatgtcttatgaatgcaggtcagagggtcacatgttaacactagagtctgtcgagaggtaggatttgacactggttttctcactatttttgggagattctgcacgagtcacgcacccccttcacatgacgctatgtactttctcacagggataataaagttagagcactctcgttgca

SEQ ID NO: 344719 - DNA, 3826 bp, Artificial Sequence
  derived and/or modified sequence
atcttgactgcctgttaaacttacctatgtggagcctcatttcaaagcacgaacgcctagagattctgcttgattggttacactgggactgcccagaccctggagttctttcgagagtcccagataactgtgattgcggccgaggctgagaatcaccgcttagaagcctcagctgtgattggctaccttctcccatcaccccagagtttttaaagctgggagccaggtaccctgcaaaacccaaaatgtgtatttcctgttctgtcgcctatcacacctggcccgggtggtctaggaagggaattgcacattaatctcacctggggagattcagcaagccgtaattctccaaagcccactgaagcccaattacagccaaatccctgaggatggggcccaggtgatgtcaaggaaacacaggctggaagcaagacctgacctgagggagttcttcagccttaacctaaggtctcatactcggagcactatgacatcgccccagctagagtggactctgcagacccttctggagcagctgaacgaggatgaattaaagagtttcaaatcccttttatgggcttttcccctcgaagacgtgctacagaagaccccatggtctgaggtggaagaggctgatggcaagaaactggcagaaattctggtcaacacctcctcagaaaattggataaggaatgcgactgtgaacatcttggaagagatgaatctcacggaattgtgtaagatggcaaaggctgagatgatggaggacggacaggtgcaagaaatagataatcctgagctgggagatgcagaagaagactcggagttagcaaagccaggtgaaaaggaaggatggagaaattcaatggagaaacagtctttggtctggaagaacaccttttggcaaggagacattgacaatttccatgacgacgtcactctgagaaaccaacggttcattccattcttgaatcccagaacacccaggaagctaacaccttacacggtggtgctgcacggccccgcaggcgtggggaaaaccacgctggccaaaaagtgtatgctggactggacagactgcaacctcagcccgacgctcagatacgcgttctacctcagctgcaaggagctcagccgcatgggcccctgcagttttgcagagctgatctccaaagactggcctgaattgcaggatgacattccaagcatcctagcccaagcacagagaatcctgttcgtggtcgatggccttgatgagctgaaagtcccacctggggcgctgatccaggacatctgcggggactgggagaagaagaagccggtgcccgtcctcctggggagtttgctgaagaggaagatgttacccagggcagccttgctggtcaccacgcggcccagggcactgagggacctccagctcctggcgcagcagccgatctacgtaagggtggagggcttcctggaggaggacaggagggcctatttcctgagacactttggagacgaggaccaagccatgcgtgcctttgagctaatgaggagcaacgcggccctgttccagctgggctcggcccccgcggtgtgctggattgtgtgcacgactctgaagctgcagatggagaagggggaggacccggtccccacctgcctcacccgcacggggctgttcctgcgtttcctctgcagccggttcccgcagggcgcacagctgcggggcgcgctgcggacgctgagcctcctggccgcgcagggcctgtgggcgcagatgtccgtgttccaccgagaggacctggaaaggctcggggtgcaggagtccgacctccgtctgttcctggacggagacatcctccgccaggacagagtctccaaaggctgctactccttcatccacctcagcttccagcagtttctcactgccctgttctacgccctggagaaggaggagggggaggacagggacggccacgcctgggacatcggggacgtacagaagctgctttccggagaagaaagactcaagaaccccgacctgattcaagtaggacacttcttattcggcctcgctaacgagaagagagccaaggagttggaggccacttttggctgccggatgtcaccggacatcaaacaggaattgctgcaatgcaaagcacatcttcatgcaaataagcccttatccgtgaccgacctgaaggaggtcttgggctgcctgtatgagtctcaggaggaggagctggcgaaggtggtggtggccccgttcaaggaaatttctattcacctgacaaatacttctgaagtgatgcattgttccttcagcctgaagcattgtcaagacttgcagaaactctcactgcaggtagcaaagggggtgttcctggagaattacatggattttgaactggacattgaatttgaaaggtgcacttacctaaccattccgaactgggctcggcaggatcttcgctctcttcgcctctggacagatttctgctctctcttcagctcaaacagcaacctcaagtttctggaagtgaaacaaagcttcctgagtgactcttctgtgcggattctttgtgaccacgtaacccgtagcacctgtcatctgcagaaagtggagattaaaaacgtcacccctgacaccgcgtaccgggacttctgtcttgctttcattgggaagaagaccctcacgcacctgaccctggcagggcacatcgagtgggaacgcacgatgatgctgatgctgtgtgacctgctcagaaatcataaatgcaacctgcagtacctgaggttgggaggtcactgtgccaccccggagcagtgggctgaattcttctatgtcctcaaagccaaccagtccctgaagcacctgcgtctctcagccaatgtgctcctggatgagggtgccatgttgctgtacaagaccatgacacgcccaaaacacttcctgcagatgttgtcgttggaaaactgtcgtcttacagaagccagttgcaaggaccttgctgctgtcttggttgtcagcaagaagctgacacacctgtgcttggccaagaaccccattggggatacaggggtgaagtttctgtgtgagggcttgagttaccctgattgtaaactgcagaccttggtgttacagcaatgcagcataaccaagcttggctgtagatatctctcagaggcgctccaagaagcctgcagcctcacaaacctggacttgagtatcaaccagatagctcgtggattgtggattctctgtcaggcattagagaatccaaactgtaacctaaaacacctacgcctctggagctgctccctcatgcctttctattgtcagcatcttggatctgctctcctcagcaatcagaagcttgaaactctggacctgggccagaatcatttgtggaagagtggcataattaagctctttggggttctaagacaaagaactggatccttgaagatactcaggttgaagacctatgaaactaatttggaaatcaagaagctgttggaggaagtgaaagaaaagaatcccaagctgactattgattgcaatgcttccggggcaacggcacctccgtgctgtgactttttttgctgagcagcctgggatcgctctacgaattacacaggaagcgggattcgggtctctaagatgtcttatgaatgcaggtcagagggtcacatgttaacactagagtctgtcgagaggtaggatttgacactggttttctcactatttttgggagattctgcacgagtcacgcacccccttcacatgacgctatgtactttctcacagggataataaagttagagcactctc

SEQ ID NO: 344720 - DNA, 3421 bp, Artificial Sequence
  derived and/or modified sequence
gaaacacaggctggaagcaagacctgacctgagggagttcttcagccttaacctaaggtctcatactcggagcactatgacatcgccccagctagagtggactctgcagacccttctggagcagctgaacgaggatgaattaaagagtttcaaatcccttttatgggcttttcccctcgaagacgtgctacagaagaccccatggtctgaggtggaagaggctgatggcaagaaactggcagaaattctggtcaacacctcctcagaaaattggataaggaatgcgactgtgaacatcttggaagagatgaatctcacggaattgtgtaagatggcaaaggctgagatgatggaggacggacaggtgcaagaaatagataatcctgagctgggagatgcagaagaagactcggagttagcaaagccaggtgaaaaggaaggatggagaaattcaatggagaaacagtctttggtctggaagaacaccttttggcaaggagacattgacaatttccatgacgacgtcactctgagaaaccaacggttcattccattcttgaatcccagaacacccaggaagctaacaccttacacggtggtgctgcacggccccgcaggcgtggggaaaaccacgctggccaaaaagtgtatgctggactggacagactgcaacctcagcccgacgctcagatacgcgttctacctcagctgcaaggagctcagccgcatgggcccctgcagttttgcagagctgatctccaaagactggcctgaattgcaggatgacattccaagcatcctagcccaagcacagagaatcctgttcgtggtcgatggccttgatgagctgaaagtcccacctggggcgctgatccaggacatctgcggggactgggagaagaagaagccggtgcccgtcctcctggggagtttgctgaagaggaagatgttacccagggcagccttgctggtcaccacgcggcccagggcactgagggacctccagctcctggcgcagcagccgatctacgtaagggtggagggcttcctggaggaggacaggagggcctatttcctgagacactttggagacgaggaccaagccatgcgtgcctttgagctaatgaggagcaacgcggccctgttccagctgggctcggcccccgcggtgtgctggattgtgtgcacgactctgaagctgcagatggagaagggggaggacccggtccccacctgcctcacccgcacggggctgttcctgcgtttcctctgcagccggttcccgcagggcgcacagctgcggggcgcgctgcggacgctgagcctcctggccgcgcagggcctgtgggcgcagatgtccgtgttccaccgagaggacctggaaaggctcggggtgcaggagtccgacctccgtctgttcctggacggagacatcctccgccaggacagagtctccaaaggctgctactccttcatccacctcagcttccagcagtttctcactgccctgttctacgccctggagaaggaggagggggaggacagggacggccacgcctgggacatcggggacgtacagaagctgctttccggagaagaaagactcaagaaccccgacctgattcaagtaggacacttcttattcggcctcgctaacgagaagagagccaaggagttggaggccacttttggctgccggatgtcaccggacatcaaacaggaattgctgcaatgcaaagcacatcttcatgcaaataagcccttatccgtgaccgacctgaaggaggtcttgggctgcctgtatgagtctcaggaggaggagctggcgaaggtggtggtggccccgttcaaggaaatttctattcacctgacaaatacttctgaagtgatgcattgttccttcagcctgaagcattgtcaagacttgcagaaactctcactgcaggtagcaaagggggtgttcctggagaattacatggattttgaactggacattgaatttgaaaggtgcacttacctaaccattccgaactgggctcggcaggatcttcgctctcttcgcctctggacagatttctgctctctcttcagctcaaacagcaacctcaagtttctggaagtgaaacaaagcttcctgagtgactcttctgtgcggattctttgtgaccacgtaacccgtagcacctgtcatctgcagaaagtggagattaaaaacgtcacccctgacaccgcgtaccgggacttctgtcttgctttcattgggaagaagaccctcacgcacctgaccctggcagggcacatcgagtgggaacgcacgatgatgctgatgctgtgtgacctgctcagaaatcataaatgcaacctgcagtacctgaggttgggaggtcactgtgccaccccggagcagtgggctgaattcttctatgtcctcaaagccaaccagtccctgaagcacctgcgtctctcagccaatgtgctcctggatgagggtgccatgttgctgtacaagaccatgacacgcccaaaacacttcctgcagatgttgtcgttggaaaactgtcgtcttacagaagccagttgcaaggaccttgctgctgtcttggttgtcagcaagaagctgacacacctgtgcttggccaagaaccccattggggatacaggggtgaagtttctgtgtgagggcttgagttaccctgattgtaaactgcagaccttggtgttacagcaatgcagcataaccaagcttggctgtagatatctctcagaggcgctccaagaagcctgcagcctcacaaacctggacttgagtatcaaccagatagctcgtggattgtggattctctgtcaggcattagagaatccaaactgtaacctaaaacacctacgcctctggagctgctccctcatgcctttctattgtcagcatcttggatctgctctcctcagcaatcagaagcttgaaactctggacctgggccagaatcatttgtggaagagtggcataattaagctctttggggttctaagacaaagaactggatccttgaagatactcaggttgaagacctatgaaactaatttggaaatcaagaagctgttggaggaagtgaaagaaaagaatcccaagctgactattgattgcaatgcttccggggcaacggcacctccgtgctgtgactttttttgctgagcagcctgggatcgctctacgaattacacaggaagcgggattcgggtctctaagatgtcttatgaatgcaggtcagagggtcacatgttaacactagagtctgtcgagaggtaggatttgacactggttttctcactatttttgggagattctgcacgagtcacgcacccccttcacatgacgctatgtactttctcacagggataataaagttagagcactctcgttgca

SEQ ID NO: 344721 - DNA, 3198 bp, Artificial Sequence
  derived and/or modified sequence
atgtcaaggaaacatcgcctcgaggctcgccctgacctgcgcgaatttttttctctgaacctcaggagccacacccggtctacaatgaccagtccacagcttgagtggacacttcagactctgctcgaacagctgaacgaggatgaattgaagagttttaaatcactgctatgggcttttcctttggaggatgtcctgcaaaagaccccttggtcagaagttgaggaagcggatggcaaaaaactggcggagatcctggtgaacacctcttccgagaactggatccgtaatgcaacggttaatattttggaagagatgaacctgacggagctgtgtaaaatggccaaagctgaaatgatggaagacggccaggttcaggaaattgacaaccccgagctcggagacgcagaggaagactccgagctggcaaagcctggagagaaggagggatggcgcaactccatggagaaacaatcccttgtgtggaagaacaccttttggcaaggcgacatcgacaacttccacgatgacgtgacactccgtaaccagaggttcatcccttttctgaacccacggaccccacggaagctcaccccatatactgtcgtattgcacgggccagctggagtggggaagaccactctggctaaaaagtgcatgctcgattggaccgactgtaacttgtctccaacattacgatacgcattttacctgtcttgtaaggaactgtccagaatgggaccatgctcattcgcagagctgatatccaaagactggcccgagctgcaggacgacattccatccattttggcgcaggcacagcgaatcctgttcgtcgtcgatgggcttgacgagcttaaagtacctcctggggctttaatacaagatatttgtggggattgggaaaaaaagaagccagttcctgtgctgctggggtccctcttgaaacgaaagatgttgcccagggctgctctgctagttactacgcgcccacgcgctttacgggatctgcagctgctggcacagcagcccatctacgtaagagtggagggctttttagaggaggatagacgcgcatactttttgcggcactttggagacgaggatcaagctatgagagcatttgagctgatgcggagtaacgctgcacttttccagttaggctccgccccagcagtgtgttggatcgtttgcaccaccctaaagctccagatggaaaagggcgaagatccagttccaacatgcctgaccagaactggcctgtttctgagattcctctgctctcgtttccctcaaggcgctcaactcaggggtgcattgaggactttatccctcctggcagcgcagggcctctgggcccagatgtcagtatttcacagggaagatctcgagagacttggcgttcaggaatctgaccttcggctgtttttggatggggatatactcaggcaagaccgggtttccaagggctgctacagttttatccacctgtcatttcagcagtttcttaccgctcttttttacgccctggagaaggaggaaggagaagacagggacggccacgcgtgggatataggcgatgtgcagaagctgctgagtggggaagagcgcctcaagaacccagacttgattcaggtgggccattttctgttcggtttggccaacgaaaagcgcgctaaggaactcgaggctacctttggttgccgaatgagtccagatataaaacaggaattactacagtgcaaggctcatctacacgccaacaagcccctctctgtgaccgacctcaaggaagttctaggctgcctttacgagtcccaggaggaagagcttgccaaagttgtcgtggctccctttaaggagattagtatacacctgaccaataccagtgaagtgatgcattgctccttttctctgaaacactgccaagacctgcagaaactctctctgcaggtggcaaaaggtgtctttcttgagaactatatggacttcgagttagatatcgaattcgaaaggtgcacctacttaaccatcccgaattgggccagacaggatttacgctcattgagattatggacagatttctgtagcctcttcagtagcaattcaaaccttaagtttctagaagtcaaacaatctttcctgtcagatagttcagtccgcatactctgcgatcatgtgaccaggtccacctgtcacttgcaaaaggttgaaatcaagaacgtgactcctgacactgcttacagggatttctgtctggccttcataggaaagaaaaccctcacccacctcactctggctggccacatcgaatgggagcgaacgatgatgctaatgctgtgtgacctcctgcggaaccacaaatgcaatctgcagtatttacggctgggagggcattgtgcgacacctgagcagtgggccgagttcttttatgtgttaaaggccaatcagtcgttgaagcaccttaggctctccgcgaatgtgctccttgacgaaggtgccatgttactatataaaacaatgacccggccaaaacattttttgcaaatgctatcgctcgagaattgcagactgactgaagcgtcttgcaaggaccttgccgctgttctcgtcgtttccaagaaactgactcatctctgcctagctaaaaatccgattggcgatacgggcgttaaattcctctgcgagggcttgtcttaccccgattgcaagttgcaaactctggtgctacaacagtgcagtatcaccaaattgggctgtagatacctctccgaagctctacaggaggcgtgctcccttactaacctggacctgtccatcaatcagatcgcacgtggactgtggatactgtgccaggctttggaaaatccaaattgtaatctgaaacacctccgcctttggtcttgctctctcatgcctttctattgtcagcacttgggctctgccctcctctcgaaccaaaagttggaaacactggacctcggccagaaccatctgtggaaaagcggcatcataaagctctttggggtcttgaggcagcggacgggcagtctgaaaattctcaggcttaaaacctatgagacaaacctggagatcaaaaaactgttggaagaggtcaaggaaaagaatccaaaactcaccatcgactgcaatgcgtcgggcgcaacggctcccccatgctgcgatttcttctgctag

SEQ ID NO: 344722 - DNA, 3198 bp, Artificial Sequence
  derived and/or modified sequence
atgagtagaaaacacagactcgaggcgagaccagacctacgggaattcttcagtctgaacctccgatcacatacacgcagcacaatgacttcgccacaactggagtggaccttacagactctactcgagcagcttaacgaggacgaactcaaatcttttaaatctctgctgtgggctttccctctagaagacgtattgcagaagactccgtggtccgaagtggaagaggccgatggaaagaagctggcagagattcttgtaaacacctccagcgaaaattggatccggaatgccactgtgaatattttggaggaaatgaacctaaccgagctctgtaaaatggccaaggctgagatgatggaagacggacaggtgcaggagatagacaaccctgagctcggtgacgctgaagaagattcggagctggcaaagcccggtgaaaaagagggatggaggaatagtatggagaagcaaagtttggtgtggaagaacacgttctggcaaggggacatcgacaactttcatgacgacgtgacactccgtaaccagaggtttattccatttctgaaccctcggacaccacgcaagctgactccctacacagtcgttctgcatggtcccgctggggtcggaaagacaactttggccaaaaagtgtatgttggattggactgactgcaatctgagtccgaccctgagatacgccttctatctgagttgcaaagaacttagcagaatgggtccgtgctcctttgccgagttaatttctaaggattggcccgagctgcaggatgacattcctagcattctcgcacaggcccagcgcattctgtttgtggtcgatggactcgacgaacttaaagtccccccaggcgcactcatacaagatatctgcggcgactgggaaaagaagaaaccagtgccggttctcctgggatccctgcttaagagaaagatgttgcccagagccgcactgctggtcacaacccgcccaagggctttgagggatttacagttgcttgcacaacagccaatctacgtgcgggtcgaggggttcctagaagaggacaggcgggcttattttctacggcacttcggcgacgaggaccaggcaatgagagcgtttgagctgatgcgaagcaatgccgctctgttccaactgggctctgcacctgccgtgtgttggatcgtttgtaccacccttaagctgcaaatggagaagggggaagatcccgtgccaacatgtttaactcggaccggcctcttcctgcggttcctgtgctcccgttttccgcagggcgcacagctgcggggtgccctgaggacactgagtctgctggccgctcaggggctctgggcacagatgagcgtgttccaccgagaagatctcgagagactgggagtacaggaatccgatctgcgactttttctggatggggatatactgcggcaggatagagtgagtaagggctgctattcgtttatccacctatcattccagcagttcttgactgctctgttctatgcactggaaaaagaagaaggagaagaccgcgatggccacgcttgggacatcggtgacgtccagaaacttctgtctggtgaggagagactgaaaaatcccgatctgatccaggtcggtcactttctgtttggtctggccaacgaaaagagggcaaaggaattagaggctacatttggatgccggatgagccccgatataaaacaagaactgcttcagtgcaaggctcatctacacgcaaataagccacttagtgtaacagacctcaaggaggtgctcgggtgtttgtatgaatctcaagaagaagagctggcgaaagtggtggtcgccccattcaaggagatttctatacacctcacaaatacttccgaggtaatgcattgctcattttctctcaaacactgccaggacctgcagaaactgagccttcaagtggccaagggggtgttcctggagaactatatggattttgagctcgatatcgagttcgagcggtgtacttacctgaccataccaaattgggcccgacaggatctgcgatcactaagattatggacagatttttgtagcctgtttagctcaaatagcaatctcaaatttttggaggtgaaacagtcttttctctccgactccagcgtgcggatactgtgcgaccatgtcactcgatccacgtgccaccttcagaaagtcgagatcaagaatgtgaccccagataccgcgtatagggacttttgtttagcctttattgggaaaaaaactttgactcacctgactctggcaggccatatcgagtgggaaagaaccatgatgctaatgctgtgcgatttactgagaaaccacaagtgtaatctccagtatctgcggcttggcggacactgcgccacccctgagcaatgggctgaatttttttacgtgctgaaggccaatcagtcccttaagcacctccgcttgtccgccaacgtcttattggatgagggggctatgcttctgtacaagaccatgacgagacctaaacatttcttacagatgctcagtctcgagaattgtcgcttaaccgaggcctcttgcaaggatctagctgcagtgttagttgtgagcaagaagctgacacacctctgcttggccaaaaatcctataggggacaccggcgtgaaattcctgtgcgaaggactgtcttatcctgactgtaaattgcagaccctggtcctacagcagtgttcaattactaagctcggttgcagatacctatctgaggctctgcaggaagcatgtagcctgactaacttggacctgagcatcaaccagatcgctagagggctatggatcctatgccaagctcttgagaatccaaattgcaacctgaagcatttacgcctctggagttgcagcctgatgccattttattgtcagcatttgggctctgcactgctctccaaccagaagctcgagacgctcgaccttggtcagaatcacttgtggaaaagcgggatcataaagttgttcggggtgctccggcagaggaccggctccctcaaaattttaagactgaagacctacgaaactaacctggaaataaaaaaattgctcgaggaggtaaaggagaagaaccctaagttaacgattgattgcaatgccagtggtgcaaccgcacccccttgttgcgactttttttgctag

SEQ ID NO: 344723 - DNA, 3198 bp, Artificial Sequence
  derived and/or modified sequence
atgtctcggaagcacaggctcgaagctcgccctgatctcagagaatttttcagtctgaatctgcggtctcatacaaggagtactatgaccagcccccagctggagtggactttgcagacactcctagagcagctcaatgaggatgaactgaaatcattcaaaagtctgctgtgggcttttccattagaagatgttctgcaaaaaacgccctggtcagaagtcgaagaggccgatggtaagaagctggcagagattctagtaaacacatcgtcagagaattggatcagaaatgcaacagtaaatattctggaggagatgaatctgacagagctgtgcaaaatggccaaagccgagatgatggaggacggtcaggtccaggagatcgataaccccgaactaggggacgccgaggaggacagcgaactcgccaagccgggtgagaaagagggatggagaaactccatggaaaaacagtccctggtttggaagaatacattctggcaaggcgacattgacaacttccacgacgacgtcaccctgagaaaccagaggttcataccatttctgaatcctagaacaccgcgtaaactcactccttacactgtggtcctccatggacctgccggagtggggaaaacaacactggctaagaagtgcatgttagactggaccgattgtaacctgtctccaacattacgctatgccttctacctatcttgcaaagaattgtctaggatggggccttgtagttttgccgaactcatctccaaagattggcccgaattgcaggatgatattccgtcaattctagcgcaagcccagcggatactcttcgtcgttgatgggctggatgaacttaaggtcccaccaggtgcactgatccaagatatttgcggagactgggagaagaagaagcccgtcccggtcctgctcggtagcctgctcaaaaggaagatgctacccagagcagccttgctggtgacaactcgaccacgcgctcttcgtgatttgcagctcctcgctcagcagcctatttatgtgcgcgtggaggggtttcttgaagaagacagaagggcatacttcttacggcacttcggggacgaagaccaagcaatgagagccttcgaactaatgcgcagcaacgccgctttgtttcagctaggcagtgcgccagccgtctgttggattgtttgcaccactcttaaactccaaatggagaagggagaggacccagtgcctacttgcttaactagaacgggtctgtttctccggtttctgtgctccaggtttccacagggcgctcagcttcggggtgccttacgtaccctgtctttgctggccgcacagggcctgtgggcgcagatgtccgtcttccatagggaagatctggagcgcctgggcgtgcaagagagcgatctgcgcctcttcttggatggggacatattgcggcaggatcgagtaagtaaaggttgctactctttcatacacctcagctttcagcaattcctcacagcgttattctacgctcttgaaaaggaagagggagaagatagggacggacatgcctgggatattggagatgtgcagaagctgctgtctggggaggaacggctcaaaaacccagatttgatccaggttggccatttcttgtttggtctggcgaacgaaaaaagggcaaaggaattggaggccactttcggctgccggatgagtccagacataaaacaagagctcctgcaatgcaaggctcacctgcacgctaataagcccctgagcgtgaccgatctcaaggaggtgcttggctgtctctatgagtcacaagaagaagaactggccaaagtagttgtcgctccatttaaggaaatctctattcacctgaccaataccagtgaagtaatgcactgctcatttagcttgaaacactgccaggatctccagaagctgtccctccaagtggctaaaggggtgtttctggaaaattatatggatttcgaactggacattgagttcgagcgttgtacctatctaaccatcccgaactgggcccgacaggacctccgcagtcttagattgtggaccgatttttgcagtttattcagttctaacagcaatctgaagttcttggaggtaaagcagtcatttctgtccgattctagcgtaaggatattgtgcgatcacgtgacgagatcaacatgtcacctgcagaaggtcgagataaaaaacgtgaccccagacaccgcctatcgggatttctgcctggccttcatcggtaaaaagacacttacgcacctcacactagccggacatatagaatgggaaagaaccatgatgctgatgctatgcgacctcctgaggaatcacaaatgcaaccttcagtatctgagactgggcggacactgcgctacgccagagcaatgggctgagttcttttacgtgctcaaggcaaaccagagtctgaaacacctgaggcttagcgcaaacgtgctgctcgatgagggtgctatgctcctctacaaaacgatgacacgccctaagcattttcttcaaatgcttagtctggaaaactgtcgcctaactgaggcttcctgcaaagatcttgcagccgtcctcgtggtctctaaaaaactcacgcacctctgccttgcgaagaatcctatcggcgatactggagtcaagtttctgtgcgaaggactgagctaccctgattgtaaactgcagaccctagtgctccaacaatgtagcattaccaaattgggatgtcgatacctatccgaggccctccaggaggcctgctcgctgaccaacctcgatttgagtatcaatcagattgcccgtggactgtggattttgtgccaggccttggagaatcctaattgcaacttgaagcacctgagattgtggtcatgctccctcatgccattttactgccagcaccttgggtccgccttgctttctaaccagaagctggaaactttggacctgggccaaaaccacctgtggaaatcgggaatcattaagcttttcggagtcctgaggcagcgaaccggctcactgaagatcctgagacttaaaacctatgagaccaacttggagattaaaaagctgcttgaggaggttaaggaaaaaaatcctaaactaactattgattgcaatgcttcaggcgcaaccgcccctccttgctgcgacttcttctgctag

SEQ ID NO: 344724 - DNA, 3198 bp, Artificial Sequence
  derived and/or modified sequence
atgtctaggaagcatcgcctggaggcacgcccagacttacgcgaattcttttctctgaacttgcgttcgcatacaagatctaccatgacatccccacagttggaatggactcttcagactcttctcgaacaactgaacgaagatgagctgaagtcctttaagtcattattgtgggcatttccgttggaagacgtcctgcagaagacaccatggtccgaagtggaggaggctgatgggaaaaagctcgccgaaatcctggtgaatacaagcagcgaaaactggatacggaatgccaccgtgaacattttagaggagatgaacttaaccgaactttgcaaaatggctaaagccgagatgatggaagatggtcaggtacaggagatcgataatcctgaattgggagatgctgaagaagactcggagctggctaaaccaggggagaaggaaggatggcgaaatagtatggagaaacagtctctggtttggaaaaataccttttggcagggggacatcgacaatttccacgatgatgtgaccctccgcaatcagagatttattcctttcctgaatccaaggacccccaggaaactgactccttacacagtcgttctgcacggaccagctggggtgggaaaaaccacattagccaaaaaatgcatgcttgattggacagactgtaatctaagccctactctccgttacgccttttatctaagttgtaaagaactgagtaggatgggaccctgcagtttcgcagaactgatcagcaaggactggccagagcttcaggacgacattccctctatccttgcgcaggcacaaagaattttgttcgtggtcgacggcttggacgaattgaaggtgccgccaggggcactgatccaggacatctgcggagattgggagaagaagaagcctgtcccggtgctgctggggtctctgctcaagagaaaaatgttaccccgagcagcacttctggtgacgacccggccacgggcattgagggacctgcaactcctggcgcagcagccaatctacgtccgcgtcgaagggtttctcgaagaagatcggcgagcatacttcctaagacattttggagacgaggatcaggcaatgcgagcatttgagctgatgagaagtaacgccgctctgttccaacttgggtcggctcctgcggtctgctggatcgtgtgtactaccctgaaactgcaaatggagaaaggagaagatccagtacccacctgcctgacacgaactggtctgtttctgagatttctctgtagccgcttccctcagggagcccaactacgtggggcactccgtacactcagcctcctggctgcacagggcctctgggcacagatgagtgtgttccaccgggaggatcttgaacgtctcggagtacaggaaagtgacctacggctcttcttggatggagatattctccgccaggaccgcgttagcaaaggttgctattcgttcatacatctgtctttccagcaatttttgaccgcgttgttctacgctctcgagaaagaggagggtgaagatcgagacgggcatgcctgggacattggcgatgtccaaaaactcctgtccggggaagaacggctgaaaaaccccgatctcattcaggtggggcatttcctgttcggactggctaacgagaaacgggctaaagaactggaagccacctttgggtgtaggatgagcccggacattaagcaggagctgcttcagtgcaaagctcatctgcacgcaaacaagcctctgagcgtaaccgacctcaaggaggtcctgggttgcctatacgagagccaggaggaagaacttgccaaggtggtggtggctcctttcaaagaaatctcaatacacctcacaaacaccagcgaagttatgcattgctccttctctctcaaacattgccaggacttgcagaaattgagcctacaggtcgctaaaggagttttccttgagaactacatggattttgagctcgacattgagtttgaaagatgcacatacctcaccatcccaaattgggcccgtcaggatcttcgatctctccgtctatggaccgacttctgcagcttgtttagtagtaactctaacctgaagtttctcgaagtaaaacaatcctttctgtcagattcaagcgtgagaattctctgtgaccatgtgacaagatctacttgtcacctacagaaggtggagataaaaaacgtgaccccagatacagcctacagggacttctgcttggcgtttattggtaaaaagaccttgacacatctgacactagccggtcacatagagtgggaacgcactatgatgctaatgttgtgcgatttgcttagaaaccataaatgcaacttacagtacttaaggctgggagggcactgtgctactccagagcagtgggccgaattcttctacgtcctcaaggcgaaccagtctttgaagcacctgcggttatcagcaaatgtgctcctggatgagggtgccatgttgctttacaagaccatgacgcgccctaagcattttctccagatgttatcattggaaaattgcaggttgacagaagcaagctgtaaggacctggctgcggttcttgtggtgagcaagaaactgacccacctgtgtctggccaagaaccccataggtgataccggggtcaaatttctctgcgaaggattgtcatacccagactgtaaactgcagacgctggtcctccaacagtgctcaattacaaaactggggtgtagatacctaagcgaggccctgcaagaagcatgcagcctcacaaatcttgacctgagcattaatcagatcgcacgtggattgtggattctttgtcaggccctggagaaccctaactgcaatctgaagcacctgcgactctggagctgctctctcatgcctttctactgtcagcacctgggatccgccctactgtccaatcagaaattggaaacactggatctgggccagaaccatctgtggaagagcgggattataaaactcttcggtgtgctgcgacagagaaccgggtccctgaagattctgaggctgaaaacctatgagaccaacctggagatcaagaagctgcttgaagaggtgaaagaaaaaaacccaaaactaaccatcgattgtaatgcctcaggcgctactgccccaccatgctgtgactttttctgctag

SEQ ID NO: 344725 - DNA, 3198 bp, Artificial Sequence
  derived and/or modified sequence
atgagcaggaagcatcggctcgaggctcggccagatcttagggagttcttttccttaaacctgagaagccatacgaggtctaccatgacctcccctcagctggagtggaccctccagacacttttggagcagttgaatgaggacgagctgaaaagctttaagtctctgctgtgggcgtttcctctagaggacgtcttgcaaaagaccccatggtcggaggtagaagaagcggacggtaaaaagctggctgaaattctggttaacactagttccgaaaactggatccgtaacgctacggttaacattctggaagagatgaatctcacagaactgtgcaagatggccaaggctgaaatgatggaggatggccaggtgcaggaaattgataatccggagttgggtgatgccgaagaggactcagagctagctaagcccggagaaaaagagggttggaggaatagcatggagaaacagagtttggtgtggaagaatacgttctggcagggggacatcgacaatttccatgacgatgtgacgcttcgaaatcaaaggttcatcccgttcttgaatccacgcactcctcgcaagttaaccccctataccgtggtcctccacggaccagccggtgtcggcaagaccacactggccaagaaatgcatgctcgactggaccgattgcaacctgtcacctaccttgcgttatgccttttacttaagttgcaaggagttgtcaaggatgggaccctgcagctttgccgagttgatcagcaaggattggcctgagctgcaggatgatattccttcaatcctggcccaggcccagaggatactgttcgtggtggatgggctggacgagctgaaagtgccccctggagccctgattcaggacatttgcggcgactgggagaaaaaaaagccagttccagttctcctggggtctctgctgaagcgcaaaatgttacccagggccgcactcttagtcaccacccgcccaagggctctacgggacctacagttgttagcccaacaaccgatctacgtccgggtcgagggctttctagaagaggatcgcagagcatatttccttcggcattttggggacgaggatcaggcgatgagggcatttgagttaatgcgaagcaacgcagcccttttccagcttggatccgccccagccgtgtgctggatcgtgtgcaccactcttaagctacagatggagaagggcgaagaccccgtccctacctgcctcacacggactgggctgtttctcaggtttctctgtagtcgtttccctcagggtgcccaactgcggggagctctccgcaccctgtcactattggctgctcagggcctctgggctcagatgagcgtgttccatcgagaagatctcgagcggcttggtgtgcaggagtctgatctacgactgtttctggatggtgacatattgcgtcaggaccgtgtctctaagggttgctactctttcatccacctatccttccagcagtttttaacagctttattttacgcacttgagaaagaggaaggtgaggaccgtgacggccacgcatgggacatcggggacgttcagaagttgttgtcaggggaggaacggctgaagaatcctgaccttatccaggttggtcactttctgttcgggttggcaaatgagaaacgcgcaaaggagttggaagctacgtttggatgtcgcatgagccctgatataaagcaggaactcttgcaatgcaaggcccatctacatgctaacaaacctctatccgtgacagacttgaaagaagtgctcggctgcctttacgagtcccaagaggaggaacttgctaaggtagtagtagccccattcaaggagatttctatccacctaaccaacacgtcagaggtgatgcactgctctttttctctcaagcactgccaggatctgcaaaaactctcacttcaggtggccaagggtgtgttcctagaaaattacatggattttgagttggatatcgagtttgagagatgcacttacctgaccatacccaactgggccagacaagacttaaggagcctgaggttgtggaccgacttctgtagcctgttttcaagcaactctaatctgaagttccttgaggttaagcaatcattcctgtctgactcttctgtaaggattttgtgtgaccacgtgaccagaagcacatgtcaccttcaaaaagtggaaatcaagaatgtcactccggacactgcttatcgagatttctgccttgcctttatcggcaaaaagaccctgactcatctcaccctggctgggcacattgaatgggaaaggacaatgatgctgatgttgtgtgatctgttgagaaaccacaagtgcaacctacagtacctgagattaggcggacattgtgccactccggagcaatgggctgagttcttttacgttctgaaggccaatcagtccttaaagcatttgagactatccgcaaatgtccttctcgatgaaggcgcaatgttgttgtataaaactatgactcgaccgaagcactttctgcagatgctgtcccttgagaactgtagactaacagaagcctcatgtaaagaccttgccgctgtactcgtggttagcaaaaaactgacacacttgtgccttgccaagaaccctattggagacacaggagtgaaattcctgtgcgagggcttgtcttaccccgactgcaaacttcagaccctggtgctgcagcagtgcagcataaccaaattaggttgcagatatctgtctgaggcactgcaggaggcctgctctttaactaatctggatctaagcatcaaccagatcgcccgagggttgtggattctttgtcaagctttggagaatcctaactgtaacctcaaacatctgcggctgtggtcctgtagtctgatgccgttttactgccaacatctggggagtgccctgttgtctaaccagaaactggaaactcttgacctgggacagaaccacctctggaagtcaggcataattaaactattcggtgtgctgagacagcgcacaggctcgctcaaaattttgaggcttaagacatatgaaacgaacctagagattaaaaaactcctggaggaggtgaaggagaagaatccaaaattgacgatagactgcaacgcatctggtgctacggctccaccctgttgcgacttcttctgctag

SEQ ID NO: 344726 - DNA, 3198 bp, Artificial Sequence
  derived and/or modified sequence
atgagcaggaagcaccgactggaggctagacccgacctcagagagttcttcagtctgaacctgagaagccacacacgctccaccatgacatctccacagctcgaatggactttacagacgttattggaacagctgaatgaagacgagctaaagtcctttaagtcactcctctgggcttttccccttgaagatgttctgcagaaaaccccatggtcagaggttgaggaagccgatggaaaaaagttggccgaaatactcgtgaacacctcctccgaaaactggatcagaaacgcaaccgtgaacatcctcgaagagatgaacttgacagaactttgcaagatggcaaaggctgagatgatggaggacgggcaggttcaagagatcgacaaccctgaactgggtgacgccgaggaagacagtgagctggccaagccgggagagaaggagggctggcgtaacagtatggaaaaacagtcactggtctggaaaaataccttttggcagggagatatcgacaacttccacgatgatgtgacactgcggaatcaacgctttatcccttttctgaatccgagaactccgaggaaattgacgccttataccgtggtacttcacggacctgctggggttggaaagacaacacttgccaagaaatgtatgttagactggactgactgtaacctgtcccccactctgcgatatgccttttacttgtcttgtaaggagttgtccaggatggggccatgttcatttgctgaattgatttctaaggactggccagagttgcaggacgatatacccagcattctcgcacaggcgcagcgcatcctctttgttgtagacggactagatgaactaaaagtgcctcccggagctctgattcaggacatttgcggagattgggagaaaaaaaaacctgttcccgttctgttaggatcacttctgaaaagaaaaatgcttccccgagccgcattactggtgactactcggcctagagccctgagagatctgcaacttctcgcacaacaacccatctatgtgcgagtcgaagggttcctggaagaagatcgacgtgcttattttctgcgccactttggggatgaagatcaagctatgagggctttcgagctcatgcgtagtaatgccgctttgttccaattgggctcagcacccgcagtttgttggatcgtatgcacaactcttaagctgcagatggagaagggcgaggacccagtccctacctgcctgacaaggacaggcctgtttctgcgatttctctgctcccggtttccacaaggcgctcagttacgcggagccctcagaactctatctctgctggcggctcagggactgtgggcccagatgagtgtcttccaccgggaggatctcgagaggttgggggtccaagaatctgacctgagactgttcctggatggcgacattctccgccaggatcgggtgtccaagggatgctactcgttcattcacctgtccttccaacagttcctgacagcccttttctatgctttggaaaaggaggaaggagaagatagagacgggcatgcctgggacatcggcgatgtgcagaaacttctgtccggagaagagaggctcaaaaaccctgatctgatccaagtggggcactttttgttcggcctggctaatgagaaacgggctaaggagttagaggcgactttcggctgtaggatgagcccagacattaaacaagagttactgcagtgcaaggcgcacttgcatgctaacaagccactgagtgtcacagaccttaaagaagtgctgggttgtctgtacgaaagccaggaagaggagttggctaaggtggtcgtggcacccttcaaggaaatctcaatccatctcacaaatacttcagaggtgatgcactgctctttctccctaaagcattgccaagacctgcagaaattgtctctgcaggttgcaaagggcgtttttcttgagaactacatggatttcgagctggacatcgagtttgagcggtgtacatacttaactattcccaactgggctcgccaggatttgcgatctctaagattgtggacagatttctgcagcctcttcagctcgaatagcaatctgaagtttctagaagttaagcagtcatttctttccgatagctctgtccgcatcctgtgcgatcatgtaactaggtctacttgtcatctacagaaggttgaaatcaagaacgttactcccgacacggcctaccgggatttctgtttagctttcattggcaagaagactttgacccatctgactctggctggccatatcgaatgggagagaactatgatgcttatgttatgcgatcttctgagaaatcataagtgcaatctccagtatttaaggctggggggtcattgtgccactcctgaacagtgggctgagttcttctatgttcttaaagccaatcagtccctgaagcatctcaggcttagcgcaaatgtgctcctcgatgaaggcgcaatgctgttgtacaagacaatgacgagacctaagcacttcctgcaaatgctgagtctggaaaattgccggctgacagaggcatcatgcaaagacctagcagcagtgttggtcgtcagcaaaaagctgacacatctgtgcctcgccaagaatcctattggggatacgggcgtgaagttcttgtgcgaaggtctgtcttatcctgattgtaagttgcaaaccttggtcttacaacagtgctctattactaaattgggatgccgttacctgtcagaggcgcttcaggaagcctgctccttaaccaatctggatctgagcattaatcagatcgctagaggactgtggatcttatgccaggcactcgagaatcctaattgtaaccttaaacatctgaggctgtggagttgctctctcatgccgttttattgtcagcacttgggatctgcccttctatccaaccaaaagcttgagacactggatctcgggcagaaccacttgtggaaatctggaattattaagctgtttggcgtgttaagacaaagaacgggctcacttaaaatacttcgtctgaaaacgtatgaaaccaatctcgagataaagaagctgctggaggaagtgaaggagaagaatccaaaactcactatcgactgcaatgctagtggtgcgacggcacccccttgttgtgattttttctgttag

SEQ ID NO: 344727 - DNA, 3198 bp, Artificial Sequence
  derived and/or modified sequence
atgagcaggaagcatcgactggaggccaggcctgacctgcgagagtttttttccctgaatcttcgatctcacacaagatcgactatgacttcaccacaactcgagtggacccttcagactctactggaacaattaaatgaagatgagcttaaaagctttaagtccctgctctgggcctttcccttggaagacgtgctgcaaaagacgccttggtctgaagtggaagaagcggacggaaaaaagctggccgagatcttggttaacacttcttccgaaaattggatacggaatgcaactgtgaatattctggaagagatgaatctgacagagctgtgcaagatggctaaggccgaaatgatggaggacggtcaggttcaagaaattgacaaccctgagcttggcgatgccgaggaagactcagaacttgccaaaccaggggaaaaagagggctggaggaactccatggaaaagcagagcctagtgtggaaaaatacattttggcagggagacatcgacaattttcacgatgacgtcaccctgcgaaaccagagatttatcccatttcttaatcctcggactcctcggaagctaaccccttatacagtggtgctgcatggcccagccggagttgggaaaaccaccctcgctaaaaagtgtatgctggattggacagactgcaatctctctccaactctacgctacgccttctatctgtcatgtaaagagttgtctagaatgggaccctgttcttttgctgaactcatcagcaaggactggcccgaattgcaagatgacatcccctcaatcctggcgcaggcacagagaattctttttgtcgttgatgggttggacgaactaaaggtacccccaggtgcactgatacaagacatttgcggagactgggaaaagaagaagccagtgccggtactattggggagcttgctcaagcgaaaaatgctgcctcgagctgccctgctggttactactcggcctagggctctgcgagatctccagttgctggcccagcagcccatttatgtgcgcgtggagggcttccttgaggaagatcgaagagcgtattttctccgtcattttggtgacgaggaccaagctatgagggcttttgaactgatgcgatccaacgcagccctattccagctgggcagcgcaccagccgtatgctggattgtctgtactacgctgaaactgcagatggaaaaaggcgaggatcccgtaccaacatgcttgacgaggacagggctcttcctccgctttctctgcagcagatttccccagggggcacaactgcggggtgccctccggaccctgagcctccttgctgcacagggcttatgggcccagatgtcagtgttccatagggaagacctcgaaagactcggggtgcaggagtccgatctgcggctcttcctggacggcgacattttacgtcaagatcgcgtctccaagggttgttactcgtttatccacctgtcgttccaacaatttctgacagcccttttttacgcgctagagaaagaagaaggagaggatcgggacggacacgcatgggatattggcgacgtgcagaagttactttccggcgaggagaggctgaagaacccggatctcatccaggttggccactttctcttcgggttggccaatgagaaaagagccaaagaactcgaggccacgttcggctgtcgcatgtctcccgatatcaaacaggagttactccagtgcaaagcacatctacacgcgaacaaaccattgtctgtgaccgacctgaaagaggtattagggtgcctgtacgaatctcaggaggaggaactggccaaagttgttgttgccccatttaaggagatcagtattcacctcactaacacctccgaggtcatgcattgtagcttctcgctcaagcattgtcaggatttacaaaaactctctctccaggtcgctaagggagtgttcctggaaaattacatggacttcgagctggacatagagttcgaacggtgtacttacttaacgattccaaattgggcaagacaggatctgaggtccctccggctatggacggacttctgttcattgttcagctctaactcgaatctcaaattcttggaagtgaagcagtcattcctgtccgactcatctgtcagaattttgtgcgaccatgtgacgcgtagtacgtgccacctgcaaaaagtcgagattaagaatgtcacacccgatactgcttaccgggacttttgcctggccttcattggaaagaagactctgacacacctaacactagccggtcatatagagtgggaaaggacaatgatgttgatgctgtgcgatttgctccgaaaccataagtgcaatctccaatatctgcggctggggggacactgtgcaacgcctgagcagtgggctgaatttttttatgttctcaaagcaaaccagtctctaaagcatctgagactatctgctaacgtgctgctggacgagggagcaatgctcctgtataagacaatgactaggcctaagcacttccttcagatgctctcactggaaaattgtcgtctgacagaggcaagctgtaaggacctcgctgctgtgctcgtcgtctcaaaaaaactgacccacctctgcctggccaagaatccaatcggggatactggcgttaagttcttatgtgagggtctgagctaccccgattgcaaactgcagaccctggttttgcaacagtgctccatcactaaactgggatgtcgatatctgtccgaagccctccaagaggcatgctcactgacaaatttagacctaagtatcaatcagatagctaggggcctttggatcctgtgccaggccctggagaacccaaattgtaaccttaaacacttgcgcctgtggtcctgtagtctcatgcctttttattgtcagcacctcggtagtgccttactgagtaaccagaagctggagaccctggatcttggacagaaccacctttggaaaagtggcattatcaagctcttcggcgtcctgcgtcagcggaccggatctttaaaaatcctgagactgaaaacctatgaaactaacctggaaataaaaaagctgctcgaggaagtgaaggagaagaatcctaaactaaccattgactgtaacgcctcaggtgcgactgcccctccttgttgtgattttttttgctag

SEQ ID NO: 344728 - protein, 980 aa, Artificial Sequence
  derived and/or modified sequence
MTSPQLEWTLQTLLEQLNEDELKSFKSLLWAFPLEDVLQKTPWSEVEEADGKKLAEILVNTSSENWIRNATVNILEEMNLTELCKMAKAEMMEDGQVQEIDNPELGDAEEDSELAKPGEKEGWRNSMEKQSLVWKNTFWQGDIDNFHDDVTLRNQRFIPFLNPRTPRKLTPYTVVLHGPAGVGKTTLAKKCMLDWTDCNLSPTLRYAFYLSCKELSRMGPCSFAELISKDWPELQDDIPSILAQAQRILFVVDGLDELKVPPGALIQDICGDWEKKKPVPVLLGSLLKRKMLPRAALLVTTRPRALRDLQLLAQQPIYVRVEGFLEEDRRAYFLRHFGDEDQAMRAFELMRSNAALFQLGSAPAVCWIVCTTLKLQMEKGEDPVPTCLTRTGLFLRFLCSRFPQGAQLRGALRTLSLLAAQGLWAQMSVFHREDLERLGVQESDLRLFLDGDILRQDRVSKGCYSFIHLSFQQFLTALFYALEKEEGEDRDGHAWDIGDVQKLLSGEERLKNPDLIQVGHFLFGLANEKRAKELEATFGCRMSPDIKQELLQCKAHLHANKPLSVTDLKEVLGCLYESQEEELAKVVVAPFKEISIHLTNTSEVMHCSFSLKHCQDLQKLSLQVAKGVFLENYMDFELDIEFERCTYLTIPNWARQDLRSLRLWTDFCSLFSSNSNLKFLEVKQSFLSDSSVRILCDHVTRSTCHLQKVEIKNVTPDTAYRDFCLAFIGKKTLTHLTLAGHIEWERTMMLMLCDLLRNHKCNLQYLRLGGHCATPEQWAEFFYVLKANQSLKHLRLSANVLLDEGAMLLYKTMTRPKHFLQMLSLENCRLTEASCKDLAAVLVVSKKLTHLCLAKNPIGDTGVKFLCEGLSYPDCKLQTLVLQQCSITKLGCRYLSEALQEACSLTNLDLSINQIARGLWILCQALENPNCNLKHLRLKTYETNLEIKKLLEEVKEKNPKLTIDCNASGATAPPCCDFFC

SEQ ID NO: 344729 - protein, 672 aa, Artificial Sequence
  derived and/or modified sequence
MTSPQLEWTLQTLLEQLNEDELKSFKSLLWAFPLEDVLQKTPWSEVEEADGKKLAEILVNTSSENWIRNATVNILEEMNLTELCKMAKAEMMEEDRRAYFLRHFGDEDQAMRAFELMRSNAALFQLGSAPAVCWIVCTTLKLQMEKGEDPVPTCLTRTGLFLRFLCSRFPQGAQLRGALRTLSLLAAQGLWAQMSVFHREDLERLGVQESDLRLFLDGDILRQDRVSKGCYSFIHLSFQQFLTALFYALEKEEGEDRDGHAWDIGDVQKLLSGEERLKNPDLIQVGHFLFGLANEKRAKELEATFGCRMSPDIKQELLQCKAHLHANKPLSVTDLKEVLGCLYESQEEELAKVVVAPFKEISIHLTNTSEVMHCSFSLKHCQDLQKLSLQVAKGVFLENYMDFELDIEFERCTYLTIPNWARQDLRSLRLWTDFCSLFSSNSNLKFLEVKQSFLSDSSVRILCDHVTRSTCHLQKVEIKNVTPDTAYRDFCLAFIGKKTLTHLTLAGHIEWERTMMLMLCDLLRNHKCNLQYLRLGGHCATPEQWAEFFYVLKANQSLKHLRLSANVLLDEGAMLLYKTMTRPKHFLQMLSLENCRLTEASCKDLAAVLVVSKKLTHLCLAKNPIGDTGVKFLCEGLSYPDCKLQPHKPGLEYQPDSSWIVDSLSGIRESKL

SEQ ID NO: 344730 - DNA, 2943 bp, Artificial Sequence
  derived and/or modified sequence
atgaccagcccccagctggagtggaccctgcagaccctgctggagcagctgaacgaggacgagctgaagagcttcaagagcctgctgtgggccttccccctggaggacgtgctgcagaagaccccctggagcgaggtggaggaggccgacggcaagaagctggccgagatcctggtgaacaccagcagcgagaactggatcagaaacgccaccgtgaacatcctggaggagatgaacctgaccgagctgtgcaagatggccaaggccgagatgatggaggacggccaggtgcaggagatcgacaaccccgagctgggcgacgccgaggaggacagcgagctggccaagcccggcgagaaggagggctggagaaacagcatggagaagcagagcctggtgtggaagaacaccttctggcagggcgacatcgacaacttccacgacgacgtgaccctgagaaaccagagattcatccccttcctgaaccccagaacccccagaaagctgaccccctacaccgtggtgctgcacggccccgccggcgtgggcaagaccaccctggccaagaagtgcatgctggactggaccgactgcaacctgagccccaccctgagatacgccttctacctgagctgcaaggagctgagcagaatgggcccctgcagcttcgccgagctgatcagcaaggactggcccgagctgcaggacgacatccccagcatcctggcccaggcccagagaatcctgttcgtggtggacggcctggacgagctgaaggtgccccccggcgccctgatccaggacatctgcggcgactgggagaagaagaagcccgtgcccgtgctgctgggcagcctgctgaagagaaagatgctgcccagagccgccctgctggtgaccaccagacccagagccctgagagacctgcagctgctggcccagcagcccatctacgtgagagtggagggcttcctggaggaggacagaagagcctacttcctgagacacttcggcgacgaggaccaggccatgagagccttcgagctgatgagaagcaacgccgccctgttccagctgggcagcgcccccgccgtgtgctggatcgtgtgcaccaccctgaagctgcagatggagaagggcgaggaccccgtgcccacctgcctgaccagaaccggcctgttcctgagattcctgtgcagcagattcccccagggcgcccagctgagaggcgccctgagaaccctgagcctgctggccgcccagggcctgtgggcccagatgagcgtgttccacagagaggacctggagagactgggcgtgcaggagagcgacctgagactgttcctggacggcgacatcctgagacaggacagagtgagcaagggctgctacagcttcatccacctgagcttccagcagttcctgaccgccctgttctacgccctggagaaggaggagggcgaggacagagacggccacgcctgggacatcggcgacgtgcagaagctgctgagcggcgaggagagactgaagaaccccgacctgatccaggtgggccacttcctgttcggcctggccaacgagaagagagccaaggagctggaggccaccttcggctgcagaatgagccccgacatcaagcaggagctgctgcagtgcaaggcccacctgcacgccaacaagcccctgagcgtgaccgacctgaaggaggtgctgggctgcctgtacgagagccaggaggaggagctggccaaggtggtggtggcccccttcaaggagatcagcatccacctgaccaacaccagcgaggtgatgcactgcagcttcagcctgaagcactgccaggacctgcagaagctgagcctgcaggtggccaagggcgtgttcctggagaactacatggacttcgagctggacatcgagttcgagagatgcacctacctgaccatccccaactgggccagacaggacctgagaagcctgagactgtggaccgacttctgcagcctgttcagcagcaacagcaacctgaagttcctggaggtgaagcagagcttcctgagcgacagcagcgtgagaatcctgtgcgaccacgtgaccagaagcacctgccacctgcagaaggtggagatcaagaacgtgacccccgacaccgcctacagagacttctgcctggccttcatcggcaagaagaccctgacccacctgaccctggccggccacatcgagtgggagagaaccatgatgctgatgctgtgcgacctgctgagaaaccacaagtgcaacctgcagtacctgagactgggcggccactgcgccacccccgagcagtgggccgagttcttctacgtgctgaaggccaaccagagcctgaagcacctgagactgagcgccaacgtgctgctggacgagggcgccatgctgctgtacaagaccatgaccagacccaagcacttcctgcagatgctgagcctggagaactgcagactgaccgaggccagctgcaaggacctggccgccgtgctggtggtgagcaagaagctgacccacctgtgcctggccaagaaccccatcggcgacaccggcgtgaagttcctgtgcgagggcctgagctaccccgactgcaagctgcagaccctggtgctgcagcagtgcagcatcaccaagctgggctgcagatacctgagcgaggccctgcaggaggcctgcagcctgaccaacctggacctgagcatcaaccagatcgccagaggcctgtggatcctgtgccaggccctggagaaccccaactgcaacctgaagcacctgagactgaagacctacgagaccaacctggagatcaagaagctgctggaggaggtgaaggagaagaaccccaagctgaccatcgactgcaacgccagcggcgccaccgcccccccctgctgcgacttcttctgctag

SEQ ID NO: 344731 - DNA, 2019 bp, Artificial Sequence
  derived and/or modified sequence
atgaccagcccccagctggagtggaccctgcagaccctgctggagcagctgaacgaggacgagctgaagagcttcaagagcctgctgtgggccttccccctggaggacgtgctgcagaagaccccctggagcgaggtggaggaggccgacggcaagaagctggccgagatcctggtgaacaccagcagcgagaactggatcagaaacgccaccgtgaacatcctggaggagatgaacctgaccgagctgtgcaagatggccaaggccgagatgatggaggaggacagaagagcctacttcctgagacacttcggcgacgaggaccaggccatgagagccttcgagctgatgagaagcaacgccgccctgttccagctgggcagcgcccccgccgtgtgctggatcgtgtgcaccaccctgaagctgcagatggagaagggcgaggaccccgtgcccacctgcctgaccagaaccggcctgttcctgagattcctgtgcagcagattcccccagggcgcccagctgagaggcgccctgagaaccctgagcctgctggccgcccagggcctgtgggcccagatgagcgtgttccacagagaggacctggagagactgggcgtgcaggagagcgacctgagactgttcctggacggcgacatcctgagacaggacagagtgagcaagggctgctacagcttcatccacctgagcttccagcagttcctgaccgccctgttctacgccctggagaaggaggagggcgaggacagagacggccacgcctgggacatcggcgacgtgcagaagctgctgagcggcgaggagagactgaagaaccccgacctgatccaggtgggccacttcctgttcggcctggccaacgagaagagagccaaggagctggaggccaccttcggctgcagaatgagccccgacatcaagcaggagctgctgcagtgcaaggcccacctgcacgccaacaagcccctgagcgtgaccgacctgaaggaggtgctgggctgcctgtacgagagccaggaggaggagctggccaaggtggtggtggcccccttcaaggagatcagcatccacctgaccaacaccagcgaggtgatgcactgcagcttcagcctgaagcactgccaggacctgcagaagctgagcctgcaggtggccaagggcgtgttcctggagaactacatggacttcgagctggacatcgagttcgagagatgcacctacctgaccatccccaactgggccagacaggacctgagaagcctgagactgtggaccgacttctgcagcctgttcagcagcaacagcaacctgaagttcctggaggtgaagcagagcttcctgagcgacagcagcgtgagaatcctgtgcgaccacgtgaccagaagcacctgccacctgcagaaggtggagatcaagaacgtgacccccgacaccgcctacagagacttctgcctggccttcatcggcaagaagaccctgacccacctgaccctggccggccacatcgagtgggagagaaccatgatgctgatgctgtgcgacctgctgagaaaccacaagtgcaacctgcagtacctgagactgggcggccactgcgccacccccgagcagtgggccgagttcttctacgtgctgaaggccaaccagagcctgaagcacctgagactgagcgccaacgtgctgctggacgagggcgccatgctgctgtacaagaccatgaccagacccaagcacttcctgcagatgctgagcctggagaactgcagactgaccgaggccagctgcaaggacctggccgccgtgctggtggtgagcaagaagctgacccacctgtgcctggccaagaaccccatcggcgacaccggcgtgaagttcctgtgcgagggcctgagctaccccgactgcaagctgcagccccacaagcccggcctggagtaccagcccgacagcagctggatcgtggacagcctgagcggcatcagagagagcaagctgtag

SEQ ID NO: 344732 - DNA, 2943 bp, Artificial Sequence
  derived and/or modified sequence
atgacaagtccccagctggaatggacattgcagaccctgctggaacagctcaatgaagacgaactgaagtcattcaagagtctactgtgggcttttcccttagaagacgttctgcagaaaaccccttggagtgaagtggaggaggccgatggaaagaaactcgcggagattctcgtaaacacttcctctgagaactggatacgcaatgcaacagtgaacatcctggaggagatgaatctgaccgaactttgcaaaatggccaaagccgagatgatggaggacggccaggttcaggaaattgataatcccgagctcggggatgcagaggaagacagcgaacttgctaagcctggggagaaggaaggatggagaaactctatggaaaagcaaagcctggtctggaagaatacattctggcagggagacattgacaactttcacgacgacgtcaccctgcgtaaccagcgcttcatcccgttcctgaacccccgcacccctcggaaactgaccccctacacggtggtgttgcacggacccgccggagtggggaagaccactctcgccaagaagtgcatgttggactggaccgattgtaacctgtcgcctaccctgcggtacgcgttctatctgagttgcaaagagctgtctagaatggggccttgttcattcgccgaactcatctccaaggattggccagagctgcaggacgacattcctagcatactggcccaggcacaacgcatcctgtttgtcgtggacggactggatgagctaaaggtgccccctggagcacttattcaagacatatgtggggattgggagaagaagaaacccgtacctgtgctcctcgggtcgctccttaagagaaagatgctgcctcgcgccgcccttctcgttaccaccaggcccagggctttgcgcgacctgcagttactcgcccagcagcctatttacgttcgggtggaaggcttcctggaggaggatcgaagggcctactttttgaggcactttggtgacgaagatcaggcaatgcgcgccttcgaactgatgagatcaaacgctgcattgtttcaactgggctccgctccagcagtgtgctggatcgtttgcaccacgctgaagctccagatggaaaagggggaggacccagtgccaacctgccttaccagaaccggcttgttcctgcgcttcctctgtagcagattccctcagggtgctcaactgaggggggccctccggactctgagtctgctcgctgcacagggcctgtgggcacagatgtcagtctttcacagggaagacctggagagattaggtgttcaggaaagcgatctgagactcttcctggatggcgacatcctacggcaggaccgcgtgtcaaaaggatgttacagcttcatccacctctcctttcagcagttcctcacagcactattctatgcccttgaaaaggaggagggcgaagaccgcgacggccacgcatgggatatcggcgacgtgcaaaagttgctctcgggcgaggaaagactgaaaaaccccgatctgatccaggtaggtcattttctgttcggccttgcaaacgaaaaaagggccaaggaactggaggccacatttggctgtcgtatgagtcctgatatcaaacaggagctcctccagtgtaaagcccacctgcacgccaacaagcctctgtcagtaacagacctgaaagaggtcctgggctgcctatacgaatcacaggaagaggaactggcaaaagttgtggtagcaccttttaaagaaatatccatccatctgacaaatacatcggaggtaatgcattgctcttttagcctaaaacactgccaggacttgcagaaactaagtctgcaggttgctaagggggtcttcctagagaactacatggattttgagctggacatcgagttcgaaaggtgcacttatctgaccatcccaaattgggccaggcaggacctgcgctctctgagattgtggactgacttctgctccctattctctagtaatagcaacctgaaatttctcgaagtcaaacagtcctttctgtcagactcatccgttagaattctgtgtgatcacgttactcgcagcacatgccatttgcagaaagtggaaatcaagaacgtcacacctgacaccgcgtaccgggacttttgtcttgcattcattggaaaaaagacgctgacccaccttactctagcgggacatattgaatgggagagaaccatgatgctgatgctgtgtgatcttctgcggaaccacaaatgcaacctccagtatctcaggcttggcggacactgtgcgactcccgagcagtgggccgaattcttctacgttctcaaggcaaaccagtccctgaaacacctgcgactcagcgcaaacgtgttgcttgacgaaggcgcaatgctcctctacaagactatgaccaggcctaagcatttcttacaaatgctgagcctagaaaactgccggctcactgaggcctcctgcaaagacctcgccgccgtcctggtagtgtccaaaaagttaacccatctctgcttagctaaaaacccaatcggagacaccggagtgaaattcctctgtgagggactgtcttatcctgattgcaagttgcagacactggtgctgcagcagtgctctataactaagctgggctgcagatatctaagtgaggctctccaggaggcttgctccctgacaaatctggatctgagcatcaaccagattgctcgggggttatggatcctttgccaggcccttgagaaccctaattgtaatctcaagcatctgcggctaaaaacctacgagactaatttagagattaagaagctgttagaggaggtcaaggaaaagaaccctaagttaacaattgactgtaacgcatctggagccacggctccgccgtgctgcgacttcttctgctag

SEQ ID NO: 344733 - DNA, 2943 bp, Artificial Sequence
  derived and/or modified sequence
atgaccagccctcagctagagtggacgctgcagacattgctagagcagctgaacgaagatgagctcaagtcctttaaatcactcctgtgggcctttcccctggaagacgtgttacagaagacaccctggagtgaagttgaggaagcagatgggaaaaaactggctgaaatcctcgtgaacactagctccgagaattggatccgcaatgccactgtcaacattctcgaggagatgaacctgaccgagttgtgcaagatggcaaaggctgagatgatggaggacggccaggtccaggaaattgacaaccctgagctaggggacgcagaagaggacagcgagctggccaaacccggggagaaggagggctggcgtaatagtatggagaaacaaagtctcgtgtggaagaacacattctggcagggtgacattgacaacttccacgatgacgtgacactccgcaatcaacgctttatcccattcttgaacccacggacccctcgcaagctgaccccttataccgtcgtcctgcatggcccggcaggtgtgggaaagacaacattggcaaagaagtgcatgctggactggacagattgtaacttatctcccacgctgagatacgccttttacctgtcttgcaaagagctcagtaggatgggaccctgctcttttgccgaattgatttccaaggattggcccgaactgcaggatgatatccccagtatcttagcacaggcccagcgcattctgtttgtcgttgacggcctggatgagctgaaagttcctccgggcgcactcattcaggatatctgcggtgattgggagaagaagaagcctgtccccgtgctgctcggcagtctactgaaacgaaaaatgttgcctcgggcagctctgcttgttacaacacgtccaagagccctccgggacctccaactgctggcccaacagcctatctacgtgagagtcgaggggttcttagaggaagaccgccgagcatacttcctacgacatttcggagatgaggaccaggcgatgagagcattcgaattgatgagaagtaacgccgccctttttcagctggggtccgcacccgctgtgtgttggatcgtatgtacgacccttaagctgcagatggagaagggagaggacccagtgccaacatgcctgaccagaaccggactgttcttacggttcctatgctccagatttccccaaggggcgcaactgcgcggagccttgaggaccctcagtctactggccgcacagggactgtgggcacagatgtccgtgtttcaccgcgaggatctggagcgcctcggcgtccaggagtcggatctgcgcctgtttctggacggcgacatcctcaggcaagatcgggtgagcaagggatgctacagctttattcacctctcctttcagcagtttctgacagcgcttttctacgcactggagaaggaggaaggagaagacagggacgggcatgcttgggatattggggatgtccagaagttgttaagcggggaggagcgtctaaagaacccagacctaattcaagtagggcattttctgttcggactcgccaacgaaaagcgggccaaggagttagaagccacatttggctgccgcatgagccccgatattaaacaggagctgctgcaatgcaaagcacacctgcacgccaacaaacccttatcagtgacagatcttaaagaggtattgggttgcctttacgagtcacaggaggaggagctggccaaggtggtagtggccccctttaaggaaattagcatacacctgactaatactagcgaagtcatgcactgctctttttcattaaaacactgtcaggacctgcagaaactgtccctgcaggtggccaaaggagttttcctcgaaaactatatggactttgaattggacatcgaatttgagcgctgcacctatctcactattcctaactgggctcgtcaagaccttcggagtttgcgcttatggaccgatttttgtagtctgttctcatccaactccaatctcaaatttttggaggtgaagcaaagttttttgtccgactcctcggtgcggattctctgtgaccacgtgacccgatcgacttgccatttacagaaggtggaaatcaagaacgttacgccggacaccgcttatagggacttctgtctcgctttcatcgggaagaagacactgacgcacctaacgctcgccggccacatcgagtgggaacgaactatgatgcttatgctctgtgatctccttcgcaatcacaaatgtaatctgcagtatctcagactgggaggccactgtgcaacgcccgagcagtgggccgaattcttttacgtgcttaaggccaatcaatccctgaagcacctgagattgagcgcgaacgtcctgcttgatgagggcgctatgctcctgtacaagaccatgactcgaccaaagcattttttgcaaatgttgtccctggaaaattgcagactaaccgaggcaagctgtaaggacctggccgcagtgctggtcgtgagcaagaagctgacccatctgtgcctggccaaaaacccaattggggatactggagtgaaattcctgtgtgagggtttatcctatcccgattgcaaacttcagaccctggtgttacaacaatgctctatcacaaaactggggtgcagatatttgagcgaagccctacaagaagcttgcagcttgacaaatctggacctctccatcaatcagatcgcaaggggactgtggatcctttgtcaagccttagagaacccgaattgcaacttgaagcatttaagattgaaaacttatgaaaccaacctagaaattaaaaaactgctggaggaggtgaaagagaagaaccctaaactaactatcgactgcaatgcctcgggcgcgaccgctcctccatgctgtgactttttttgctag

SEQ ID NO: 344734 - DNA, 2943 bp, Artificial Sequence
  derived and/or modified sequence
atgacctccccacagctggaatggacattacagactctgctggagcagttgaatgaggacgagctgaaaagtttcaagtcgttgttgtgggcatttcccctggaagatgtgctgcaaaagacaccatggagcgaagtcgaggaggccgacggcaagaagttggccgaaattctggtaaacacttcctccgagaattggattcgcaatgcaacagtgaatatcctggaagaaatgaacctgaccgagctgtgcaaaatggccaaggccgaaatgatggaagacggtcaggtacaggagatcgacaaccctgaactaggcgacgctgaagaagatagtgagctggcaaagcctggcgagaaggagggatggcggaactcaatggagaaacagagcctggtgtggaagaatactttttggcagggcgacattgacaatttccacgacgacgtaacccttagaaatcagagatttattccatttctgaatccaaggaccccccggaaactcacaccttacaccgtcgtcctccacggaccggccggcgttgggaaaactaccctggcgaaaaagtgtatgctagattggacagattgcaacttatcacctacgctgagatatgccttctatttgtcctgcaaggaactatcccgcatgggcccttgtagtttcgccgaattgatttctaaggattggcccgagctgcaggacgacataccatccatattggcccaagcccagcggatcctgtttgttgtggatgggctcgacgaacttaaggtgcctcctggggctctgatccaggacatatgcggcgactgggaaaagaagaagcctgtgccagtcctgctggggtctctcctgaagcgcaagatgctgcctagggccgcgctgctcgtcactactcgtcctagggctctgcgagatctccagcttcttgctcagcagcctatttatgtgagagtagaaggcttccttgaggaagaccggcgagcctatttcctgagacacttcggagatgaagaccaggcgatgcgcgctttcgagttgatgaggtccaacgccgctctatttcaattgggctcagcacccgctgtgtgttggattgtttgcacaaccctaaaactccagatggaaaaaggcgaagacccagtacctacttgcctgacaagaacagggttgttcctcagattcttgtgcagtcgatttccacagggggcccaattacgcggcgctttgcgcacactctctttgctagccgctcagggattgtgggcacagatgtctgtatttcatagggaagacctggagaggttaggcgttcaggagtctgacctgcggttgttcctggacggcgacatcctgcggcaagatagggtttctaaagggtgttatagctttatacacctgtcattccagcaattcctgactgcgcttttctacgcgcttgaaaaggaagagggggaggatagggatggccacgcttgggacatcggcgacgtgcagaaattgttatccggcgaagagaggcttaaaaaccccgacctcattcaggtaggtcattttctgtttggcctcgctaatgaaaaacgagctaaagaactggaggccacttttgggtgtagaatgtctccagatatcaagcaggagcttctgcagtgtaaggcacacctgcatgcaaataagcctctcagcgtaacagacttaaaggaagtcctgggatgtctttacgagagccaagaggaagagcttgccaaagtggtggtggctcccttcaaagagattagcattcacctgacaaatacatccgaggtgatgcactgcagtttctctcttaaacactgccaagatctccagaaactttctctacaggttgccaaaggcgtttttctggaaaactatatggactttgagttggacatcgagttcgaacgatgcacataccttacaatcccgaactgggcacgacaggatctacggagtctcagattatggacagatttctgctcacttttttcatccaacagtaacctgaaatttctggaagtcaaacagtcattcctgtccgactcgtcggtgaggatcctctgtgaccacgttacccgtagcacctgccacctgcagaaggtggagatcaagaatgtcacccccgacactgcgtaccgcgatttttgcctggcctttataggcaagaagactctcactcacctgaccctggcgggacacatcgagtgggagcgaacaatgatgttgatgctgtgcgacctgctcaggaatcacaagtgcaacttgcaatacctacggcttggcggccattgtgcaacacctgagcaatgggcagagttcttctacgtgttaaaggcaaatcagagcttaaagcacctccggctttcagcaaatgtactgctggacgagggagcaatgctcttgtataagaccatgactcgaccgaagcattttcttcagatgctgtcactcgaaaactgtagactgaccgaagctagctgtaaggaccttgctgccgtcctcgttgtgagtaagaagctcacgcacctctgcttggcgaaaaatccaatcggagacacgggtgttaagttcctgtgcgaaggcctgagttatccagattgcaagttacagaccctggtgcttcagcagtgctctatcaccaagctggggtgtagatacctttccgaagccctgcaggaagcatgcagcttgaccaacttggacttgtccattaatcagattgcaagaggcttgtggatcctgtgtcaagccctcgaaaaccctaactgcaatctgaagcacttaagactcaagacatacgaaacaaatctggaaattaaaaaactgctggaggaagtcaaggagaaaaaccctaaacttaccatcgattgcaatgcctccggcgccaccgctcctccatgctgcgatttcttttgttag

SEQ ID NO: 344735 - DNA, 2943 bp, Artificial Sequence
  derived and/or modified sequence
atgacgtccccacagcttgaatggacccttcagactctgctggagcagctaaatgaggacgagttgaagagttttaaatctctgctgtgggcttttccattagaagacgttctgcagaagacgccttggtccgaggtggaagaggctgatggcaagaaactcgccgaaatcctggtgaacacaagtagcgagaactggatcaggaatgcaactgttaatattctcgaggagatgaatctcactgagctctgtaagatggcgaaagccgaaatgatggaagatgggcaagtacaagagatcgacaaccccgaacttggagatgccgaagaggacagcgagctcgccaaacccggagaaaaagagggatggaggaattcaatggaaaagcagagcctggtgtggaagaacacattctggcaaggggacatcgacaactttcatgacgatgtaactctcaggaatcagagatttataccctttctgaatcccaggactccccgtaaactcacgccttataccgtggtattgcacggtcccgcaggcgtcggaaagacaaccctggctaagaagtgtatgctggattggaccgattgcaacctgtcccctacattacgctacgctttctatctctcctgcaaagagctgtcgaggatgggtccctgtagctttgccgaattgatctctaaggactggcctgaactgcaggatgacatccccagcatccttgctcaggcccaaaggatactctttgtcgtggacggcttggatgaattaaaggtcccaccgggggccttgatccaagatatatgtggcgattgggagaagaagaaacccgtcccggtactcctggggagcctgttgaagagaaaaatgcttcccagagccgcattattagtgaccactcgacctagggcacttagggacttgcagctactagcgcagcagcctatctacgttcgagtcgaaggttttttggaggaagatcggagagcttatttcctgaggcatttcggtgatgaagaccaagccatgcgagccttcgagctgatgcgctcaaacgccgccttgtttcaactgggaagcgcgccagccgtgtgctggatcgtgtgcacaaccctgaagttacaaatggaaaaaggcgaggatcctgttcctacgtgcctcaccagaaccggattgttcctccgtttcctgtgttcccgctttcctcagggcgcgcagctacggggggccttacgaacactgagcctccttgcagcccagggcctgtgggctcaaatgtccgtctttcacagggaagacctagagcgactgggcgtccaggaatctgacttacgcctgtttctcgatggggacatcctgaggcaggacagagtatcaaaggggtgctacagttttatccatctgagtttccagcagttccttaccgcgctattctacgccctcgagaaggaagagggtgaggatcgagatgggcatgcgtgggatataggggatgtgcaaaagttgctgtcaggggaagagcgccttaaaaaccccgacctgattcaggtcggccatttcctatttgggcttgctaacgaaaaacgagctaaggagttggaagccaccttcgggtgcaggatgagtccagatatcaagcaagagctacttcagtgcaaagcccaccttcacgctaataagcctctaagcgttaccgacctgaaggaggtcctcgggtgcctctacgagtctcaggaggaggaattggccaaggtagtggtagcaccatttaaggaaatctcaatacatctcaccaacacaagcgaggtgatgcactgttcattttccctgaagcactgccaggacctgcagaaacttagcctgcaagtcgccaagggggtttttctcgaaaactatatggacttcgaattggacattgaatttgagcggtgtacatacctgaccatcccaaattgggccagacaagatctacgatcgctcagattgtggaccgatttctgttcccttttttctagcaattccaacctcaagttcctagaggtaaagcaaagctttttgtcagacagctcagtccgaatactttgtgatcatgttacacgcagcacctgccacctgcagaaagtggagatcaagaacgtgactcccgatacagcatatagggacttttgcctggccttcatcggcaaaaaaaccctgactcaccttacgctggcaggacacatcgaatgggagcggactatgatgctgatgctgtgcgaccttctgcgcaaccacaagtgcaatctgcaatatttgcggctgggtggacactgtgccactcctgagcaatgggctgaattcttttatgtactcaaggccaaccagtcgttgaagcatctgcgcctgtccgcaaatgtgttgctagacgaaggcgccatgctcctttacaagaccatgacacgacctaaacacttcctgcagatgttgtccctagagaactgcagacttacagaggcatcatgcaaagaccttgccgccgttcttgtagtctcgaagaaacttacacacctctgtctggctaaaaacccgatcggtgacacaggcgtaaaattcctctgtgagggtctgagctaccccgactgtaagctgcagacactggtgctgcaacaatgtagtatcacgaaactaggatgccggtacctatcagaggcgctgcaggaggcctgttctctgacaaacttagatttatctatcaaccagatagctcgtggtctgtggatactttgccaagcgctggagaatccaaattgtaacctcaaacaccttcgccttaagacttatgaaacgaatctggaaattaagaaactcctcgaggaggtgaaagagaagaaccccaagctaaccatcgactgtaatgcttccggggctaccgccccgccctgctgtgactttttctgttag

SEQ ID NO: 344736 - DNA, 2943 bp, Artificial Sequence
  derived and/or modified sequence
atgacaagcccgcaactggagtggactttgcaaacccttctcgagcagctcaacgaagacgaactcaaatctttcaaaagtcttttgtgggccttccccttagaagacgttttgcaaaaaaccccctggtctgaagtcgaggaggcagatgggaagaagctggccgagatcctggtgaacacctctagtgagaactggatacggaacgccactgtgaatatcctggaggagatgaacctgaccgagctatgcaaaatggccaaagccgaaatgatggaggacggacaagttcaggagatcgataaccctgagctgggggatgccgaggaagacagtgagctggccaagcccggagaaaaggagggctggcgcaacagcatggagaagcagtcgcttgtgtggaagaataccttttggcagggggatatagacaactttcatgatgatgttacacttaggaatcaaaggttcatacctttcctgaatccccgtacaccgaggaaactgaccccttatactgtagttttacacggaccagccggagtagggaagacgacactagcaaagaaatgcatgctggactggacggattgcaacctgagtccaacactccgctatgcattctacctctcttgtaaagagctctcacggatggggccttgttccttcgccgagcttatctcaaaggactggccggagcttcaagacgacataccgtctatcttagctcaggcgcagcgcatcttgtttgtggtcgacggcctagatgaactgaaagtcccacccggagccctcatccaagacatatgtggcgattgggaaaaaaaaaaacctgtgcctgtgctgcttggctcgctgcttaagcgaaagatgttgcctcgggcggccttgctcgtgactacgcgaccgcgagctctccgtgatttacagctgctagcccagcagcccatctacgtgcgggttgaggggtttcttgaggaggatcggcgtgcatattttctcagacactttggagatgaggaccaggcaatgagggcatttgagctcatgagaagcaatgccgcactcttccagcttggctctgcccccgccgtatgttggatagtgtgcaccaccctcaagctgcagatggagaaaggcgaagacccagtaccaacttgcctaacacgcacagggctgttcctccgatttctctgtagccggtttccacaaggagctcagttgaggggagcgctcagaaccttgagtcttcttgcagcgcaagggctttgggctcagatgagtgtattccacagggaggatctggaaaggctgggcgtgcaggagtcagacctgagattatttctcgatggcgacatcttacggcaggatcgcgtgagtaaggggtgttacagctttatccacctttcttttcagcagttcctcaccgcactcttttatgccctggaaaaagaggagggtgaggaccgagacggtcatgcgtgggatattggcgatgtccagaaattgttgtctggcgaggagcgactgaaaaatcccgaccttattcaggtgggacactttctgtttggccttgccaatgagaagcgcgcaaaggagcttgaggctacctttgggtgtaggatgagtccagacataaaacaggagcttttgcagtgtaaggcacacctgcacgctaataaaccgctctccgttacagacctgaaggaggtcctgggctgcctatacgaatctcaggaggaagagctggcaaaagtggtagtcgcaccgttcaaggagatctcaattcacctgacgaatacctctgaagttatgcattgcagcttctccctgaaacactgtcaagatctccaaaaactatctcttcaggtagctaaaggcgttttcttagaaaactacatggactttgaactagacattgagttcgagagatgcacctatttaaccatccccaactgggcccgccaggacctacggtctctgcgcctgtggacggatttctgtagcctgttttcctcgaactccaacctgaaatttctggaggttaaacagagtttcctgtccgattcttcagtccggattttgtgtgaccacgtgaccagaagcacgtgccacctgcaaaaggtggaaatcaagaatgtcacaccagatactgcgtatcgggacttttgtctggccttcattgggaagaagaccctgacacatctgactctcgccggacacatcgaatgggagcggaccatgatgctcatgctgtgtgatctcttgaggaaccataagtgtaacctgcagtatctgagactgggaggacattgcgcaacacctgagcaatgggctgagttcttctatgttctcaaagcgaatcaaagcctgaaacatctgcgcctctctgcaaatgtgcttctcgatgaaggggccatgctgctctacaagacaatgacaaggcctaagcacttcctgcagatgttgtctctggaaaactgtagactgacagaggcctcttgtaaagatctggctgcagtattagtcgtgtctaaaaagctgactcacctctgcctcgcaaagaatccgatcggagacacaggggtgaagtttctgtgtgagggactcagctatcccgactgcaaattgcaaaccctggttctgcagcagtgttcgattacgaaactagggtgtaggtatctgagcgaagcccttcaagaagcgtgctccttgaccaatctggacctttccataaaccagatcgctcgggggttgtggatcctgtgtcaggccctagagaacccaaattgcaacctgaaacatcttcgactgaagacctatgaaacaaacctggagattaaaaaactcctagaagaagtcaaagagaagaaccccaagctaactattgattgcaacgccagcggcgcaaccgctccaccttgttgcgacttcttctgttag

SEQ ID NO: 344737 - DNA, 2943 bp, Artificial Sequence
  derived and/or modified sequence
atgacatcacctcaactggagtggacgctgcagacacttcttgaacaattaaacgaagacgagctcaaatcctttaaatccctgctgtgggctttcccattagaggatgtgctgcagaagacaccgtggagtgaagtggaagaagccgatggaaagaagctggccgagatcttagtgaacacctcctctgaaaattggatccgcaacgccacggtgaatatccttgaggaaatgaacttaacggagctctgtaagatggcaaaggcagaaatgatggaggatgggcaggtccaggagatcgataatcccgaactcggagacgcagaagaggattccgaactcgccaaacctggagagaaggaaggctggcgtaatagtatggaaaaacagagcctggtgtggaaaaacaccttctggcaaggcgacatcgacaactttcatgatgacgtcactttacggaatcagaggttcattccattcctgaacccaaggacaccccggaaactgaccccctacacggtagtgcttcacggacccgccggagtcgggaagaccaccttggccaagaagtgcatgctggattggaccgactgcaacctttcaccaactttgcgatacgctttttacctgtcatgtaaggaattgagcaggatgggaccctgtagcttcgccgagctgatttccaaggattggccagagctgcaagatgacatccctagcatcctcgcccaggcacagcggatcctgttcgtggtggatggtctggatgaactcaaggtcccaccgggggccttgatacaggatatatgcggggattgggagaagaaaaaacctgttcctgtactgctggggtctcttctgaagagaaagatgctacctcgcgccgccctgttggtgaccacacggcctagagcgctacgagacctgcagctcctggcgcaacagccgatttatgtgcgcgttgaagggttcctggaggaagatcgccgagcttattttctgcgtcactttggggatgaagatcaggccatgcgggcattcgagttgatgcgcagcaatgcagctttattccagctgggatcggccccggccgtatgctggatagtgtgtaccactctgaaattacagatggaaaagggagaagatcccgtgccaacatgtctgaccaggacaggcttgtttctccggtttctgtgctccagatttccccaaggagcccagcttcggggcgccctgagaactttaagccttcttgccgcccaggggctgtgggcacaaatgtccgtctttcaccgggaagatcttgaacggctgggcgtgcaagaaagtgatctccgcctgtttctcgatggtgacattttaagacaggaccgcgtgagtaagggctgctacagctttattcacctctcttttcagcagtttttgactgcactattttatgctttggagaaggaggagggtgaggaccgcgacggtcatgcttgggacatcggagatgtccagaagcttcttagtggcgaggagcgattgaaaaacccagaccttatacaggtcgggcattttctgttcggactcgccaatgaaaagagggcaaaagagttagaggccacatttggttgccggatgagcccagatattaagcaagaactgctgcaatgcaaggctcacctgcatgccaacaagccacttagcgttactgatctgaaggaagtgcttggctgtctgtatgagtctcaagaagaagagctggcgaaagtagtggtagctccgttcaaggaaatttccattcaccttaccaataccagcgaagttatgcattgcagcttcagcctaaaacattgtcaggaccttcagaaattgagcctccaggttgcgaagggagtgtttctcgagaactacatggactttgaactcgatatcgaatttgagcgctgtacctacttgactatccccaattgggcacggcaggacctccgctcgttacgcctatggacagacttttgcagtttgttctcaagtaactctaacttgaagtttttggaggtcaaacagtcatttctttccgactcatcagtgcgaatcctctgtgatcacgtgacccgatcaacgtgtcacctgcaaaaggtggaaattaagaatgtgacccccgatacggcataccgcgatttttgcttagccttcattgggaagaagactctgacccacttgaccctagcaggccatattgagtgggaacgaacgatgatgctaatgctgtgcgatctgttacgcaaccacaaatgtaacttacagtaccttcggctaggggggcattgcgccacgcccgagcagtgggccgaatttttctacgtgctgaaggccaaccagagtctaaaacatcttaggctatcggccaatgtccttcttgatgaaggggccatgctactctataagacgatgacacggcctaaacatttcttgcagatgctgagccttgaaaactgtaggctcaccgaggcatcttgcaaggatctggccgccgtgctggtcgtgtccaagaagttaacccatttatgcctcgcgaaaaatcccatcggggacacaggagtcaagttcctatgcgagggcctgtcatacccagactgcaagctgcagactctcgtgctgcagcagtgttctattactaagctgggctgccgctacctatcggaagcactacaggaggcttgttctcttacaaatttggacctgtccattaaccagatagccaggggattatggatcctgtgtcaggctctggagaatcccaactgtaatcttaagcatctgcggctgaagacctacgagacaaacttggagattaaaaaactcctagaagaagtcaaagaaaagaatccgaaactgacaattgattgtaatgcctccggcgctactgccccaccctgctgtgatttcttttgctag

SEQ ID NO: 344738 - DNA, 2943 bp, Artificial Sequence
  derived and/or modified sequence
atgacatctccacaacttgaatggacacttcaaacgttactggagcaattgaacgaagatgagctgaagagtttcaagtcactgctatgggcctttcctttggaggacgttcttcagaagactccatggtccgaagttgaggaggccgacggaaagaaactggccgaaatcttagtgaatacttccagtgaaaattggatccgtaatgcaactgtcaatatcctagaggagatgaatctgactgaactgtgcaagatggccaaggccgagatgatggaggacggccaagtgcaggaaatcgacaatcccgagctaggagatgcagaagaggactctgaattggccaaacccggagaaaaagaaggctggaggaatagcatggagaagcaatccttagtgtggaagaacacattctggcagggcgacatcgacaattttcatgatgatgtgactctgcgcaatcagcggttcatcccttttctgaaccctcggacgcccagaaaactgactccctataccgtggtgctgcacgggccggcgggtgttggaaaaactacactcgctaagaagtgcatgcttgactggacggattgtaatctctccccaacactgcgctacgcattttatttgagctgcaaagaactgagccggatgggaccttgttcattcgctgagttgatcagcaaggattggcctgagctgcaggacgacatcccaagcatcctggctcaggcccagcggattctgtttgtggtggatggcctggacgagctgaaggtcccgcccggggcactgatccaagatatctgtggcgattgggagaaaaagaagccagtgccagtgctgcttggcagtctgctgaaacgtaagatgctgccaagagctgcacttctcgtgactaccaggccacgggctcttcgagacctacagttgctagcacagcagccaatatacgtgcgggtagaggggttccttgaagaagaccggagggcttatttcctgcgccatttcggcgacgaagatcaagctatgcgtgccttcgaactgatgcgttctaatgccgccctgtttcagctgggctccgcgccggcagtgtgctggatcgtatgcaccactctgaaattacagatggaaaaaggggaggatcctgtaccaacatgcctgacccgaactgggctgttcttacgttttctgtgtagcaggtttccacagggggcccagcttagaggcgcccttcgaaccctctccctgcttgccgctcaaggactctgggctcaaatgtcagtgtttcaccgagaagatttggaacgcctcggtgtacaagagtcagacctgagactgttcctcgacggagacatcctccggcaggaccgcgtatctaaaggatgctatagtttcatccatttgtcctttcagcagtttctgaccgccctcttctacgcactggagaaggaagagggcgaggatagagacggccacgcctgggatattggagacgtacaaaagctcctgagcggggaagaacggcttaagaaccccgacttgatccaggtgggacactttttatttggtctggccaacgagaaaagagcaaaggagctggaagccactttcgggtgccggatgtccccagacatcaaacaagaactgttacaatgtaaggctcacctgcatgcaaataaacctttgagcgtgacagatctcaaggaagtcttagggtgcctctacgaatcccaggaggaggaacttgccaaagtggtcgtcgcccctttcaaggagattagcattcacctaaccaacacctccgaggttatgcactgcagtttttccctgaagcactgtcaggatctgcagaagctcagtctacaagtcgctaagggcgtcttcctggagaactacatggactttgagcttgacattgagtttgagcgatgcacatacctgactattccaaactgggcgcggcaggaccttcgctccttgcgtctctggacggacttctgctcattatttagctcaaacagcaatctcaagtttttggaagttaaacagtctttcctctccgatagttcagtccggatcttgtgcgaccatgtaacccggagcacatgtcacctccagaaagtggaaatcaagaacgtgacgcccgacacagcttatcgtgatttttgtctggcctttattggaaaaaagaccctaacccacctgactctggccggccacatcgaatgggaaaggactatgatgctgatgctctgtgacttactgagaaatcacaagtgcaatctgcagtatttaaggctgggtggacactgtgcaacgcccgagcagtgggctgagttcttctacgtgctgaaagcaaatcagagcctgaagcatctgagattgagcgccaacgtgcttttggatgagggagcgatgctcctttacaagaccatgacacggcccaagcattttctacaaatgctctcactggagaactgccgcttgacagaggccagctgcaaagatttggcggccgtcttagtcgtctcaaaaaagcttactcatctctgtctggctaaaaatcctatcggcgataccggagtgaaattcctgtgcgagggtctatcctaccctgactgcaagctacaaaccctggtcctgcagcaatgctccattacaaagctagggtgccggtatttatccgaggccctgcaggaggcttgctcactaacaaacctggacctctccatcaatcaaatcgcaagggggctgtggatcctatgccaggccctggagaacccaaactgtaacttgaaacacttaaggctcaaaacgtacgagacaaatctggaaattaaaaaactgcttgaagaggtaaaggagaagaatcccaagcttactatcgattgcaacgcgtccggtgctacagcccctccatgctgtgattttttctgctag

SEQ ID NO: 344739 - DNA, 2019 bp, Artificial Sequence
  derived and/or modified sequence
atgacctccccgcagctcgaatggaccctgcagaccctgctcgaacaacttaacgaggacgaactgaagtcattcaaatcattgttgtgggcctttccactggaggacgtgctacagaagactccatggtccgaggttgaagaagccgatggtaaaaaactggcagagatactggtgaatacaagttccgagaactggatcagaaacgctacagtcaatattctggaggagatgaacttgaccgagttgtgcaagatggcgaaagccgaaatgatggaggaggacaggcgggcctattttttaaggcatttcggcgatgaagaccaggccatgagagcgtttgaattaatgaggtccaatgccgccctgttccagctcgggagcgctcccgcagtctgctggatcgtttgtactactttgaagctgcaaatggaaaaaggcgaggaccccgtgcctacctgcctaacgaggactggtctcttcctcaggtttctgtgctcccgttttccccagggagcccaactgaggggagctctgcggacgctttctctactggccgcccaggggctgtgggcacagatgagtgtttttcacagggaagatctggaaagactgggtgtacaggaatcggacctgagattgtttctggatggcgacatcctgcggcaggaccgggtcagcaaagggtgctatagcttcattcatttgtctttccaacagttcctcaccgcactattctacgcactcgaaaaggaggagggggaggacagggacggccatgcgtgggatatcggggacgtccaaaaactcctcagtggcgaggagaggctgaagaaccccgacctcattcaagtcggccatttcctgtttgggttggctaatgaaaagcgggccaaggagctggaagccaccttcggctgtaggatgagtcccgacattaaacaggaactgcttcagtgcaaagcacatttgcacgctaataaacccctgtcagtcactgacttgaaagaggtcctcggatgtttgtatgaaagccaggaagaggaactcgcaaaagtggtggtggccccattcaaagagattagcattcacctgaccaacacctctgaggtgatgcactgcagcttcagcctgaagcactgccaggaccttcagaagctcagcctgcaggtggctaagggagtgtttctggagaattatatggacttcgagctcgatatcgagttcgaacgatgtacttacctgacaatcccgaactgggcccgtcaggacctgcggtctctccgcctgtggaccgacttctgctctctgtttagttccaactctaatctgaaatttctggaggttaagcagtcatttctctcagacagtagcgtcaggattctgtgcgatcatgtcacccgcagcacatgtcatctccaaaaggtagagatcaagaacgtgactccagacactgcttacagggatttctgccttgctttcatcgggaaaaaaactctgactcatctgacgctcgctggtcacattgagtgggagagaaccatgatgctcatgctctgtgacctgcttaggaaccataagtgtaacttacagtatctgcggctgggcggacattgcgccacccctgaacaatgggccgagtttttttatgtgttgaaggcaaatcagagcctgaaacacctccggctgtccgccaacgtgctgctggatgaaggggctatgctgttatataagacaatgactcgaccaaagcactttctgcagatgctttctctcgagaactgtaggctgaccgaggcttcctgtaaggatctggccgcagtactagtggtgtccaaaaaattaacacacctgtgcttggcaaaaaacccaatcggagacaccggcgttaagttcctctgcgagggactctcgtaccctgactgtaagttgcagccacacaagccaggtctggaataccagcccgactcctcatggattgtggacagtctctccggaattcgtgaatcgaagttatag

SEQ ID NO: 344740 - DNA, 2943 bp, Artificial Sequence
  derived and/or modified sequence
atgaccagcccccagctggagtggaccctgcagaccctgctggagcagctgaatgaagatgagctgaagagcttcaagagcctgctgtgggccttccccctggaggatgtgctgcagaagaccccctggagcgaggtggaggaggctgatggcaagaagctggccgagatcctggtgaacaccagcagcgagaactggatcagaaatgccaccgtgaacatcctggaggagatgaacctgacagagctgtgcaagatggccaaggccgagatgatggaggatggccaggtgcaggagattgacaaccctgagctgggagatgctgaggaggacagcgagctggccaagccaggagagaaggagggctggaggaacagcatggagaagcagagcctggtgtggaagaacaccttctggcagggcgacatcgacaacttccatgatgatgtgaccctgaggaaccagcgcttcatccccttcctgaaccccaggacccccaggaagctgaccccctacacagtggtgctgcacggccctgctggggtgggcaagaccaccctggccaagaagtgcatgctggactggacagactgcaacctgagccccaccctgcgctatgccttctacctgagctgcaaggagctgagcaggatgggcccctgcagctttgctgagctgatcagcaaggactggccagagctgcaggatgacatccccagcatcctggcccaggcccagaggatcctgtttgtggtggatggcctggatgagctgaaggtgcccccaggggccctgatccaggacatctgtggggactgggagaagaagaagcctgtgcctgtgctgctgggcagcctgctgaagaggaagatgctgcccagggctgccctgctggtgaccacccggccccgggccctgcgggacctgcagctgctggcccagcagcccatctacgtgcgggtggagggcttcctggaggaggacagaagagcctacttcctgcggcactttggagatgaggaccaggccatgagggcctttgagctgatgaggagcaatgctgccctcttccagctgggcagcgccccagctgtgtgctggatcgtgtgcaccaccctgaagctgcagatggagaagggagaagatcctgtgcccacctgcctgaccaggacaggcctcttcctgcgcttcctgtgcagccgcttcccccagggcgcccagctgcggggggccctgcggaccctgagcctgctggccgcccagggcctgtgggcccagatgtctgtgttccaccgggaggacctggagcggctgggcgtgcaggagagtgacctgcggctcttcctggatggagacatcctgcggcaggacagagtgtccaagggctgctacagcttcatccacctgtccttccagcagttcctgacagccctcttctacgccctggagaaggaggagggggaggacagagatggccacgcctgggacattggagatgtgcagaagctgctgtctggagaggagcggctgaagaacccagacctgatccaggtgggccacttcctgtttggcctggccaatgagaagagggccaaggagctggaggccaccttcggctgcaggatgagcccagacatcaagcaggagctgctgcagtgcaaggcccacctgcacgccaacaagcccctgtctgtgacagacctgaaggaggtgctgggctgcctgtatgagagccaggaggaggagctggccaaggtggtggtggcccccttcaaggagatcagcatccacctgaccaacaccagcgaggtgatgcactgcagcttcagcctgaagcactgccaggacctgcagaagctgagcctgcaggtggccaagggcgtcttcctggagaactacatggactttgagctggacatcgagtttgagcgctgcacctacctgaccatccccaactgggcccggcaggacctgcggagcctgcggctgtggacagacttctgcagcctcttcagcagcaacagcaacctgaagttcctggaggtgaagcagagcttcctgagtgacagctctgtgcgcatcctgtgtgaccacgtgaccaggagcacctgccacctgcagaaggtggagatcaagaatgtgaccccagacacagcctacagagacttctgcctggccttcatcggcaagaagaccctgacccacctgaccctggccggccacatcgagtgggagaggaccatgatgctgatgctgtgtgacctgctgaggaaccacaagtgcaacctgcagtacctgcggctgggcggccactgtgccaccccagagcagtgggccgagttcttctacgtgctgaaggccaaccagagcctgaagcacctgcggctgagcgccaacgtgctgctggatgaaggagccatgctgctgtacaagaccatgacccggcccaagcacttcctgcagatgctgagcctggagaactgccgcctgacagaggccagctgcaaggacctggccgctgtgctggtggtgtccaagaagctgacccacctgtgcctggccaagaaccccatcggggacacaggagtgaagttcctgtgtgagggcctgagctacccagactgcaagctgcagaccctggtgctgcagcagtgcagcatcaccaagctgggctgccgctacctgtctgaggccctgcaggaggcctgcagcctgaccaacctggacctgagcatcaaccagatcgcccggggcctgtggatcctgtgccaggccctggagaaccccaactgcaacctgaagcacctgcggctgaagacctatgagaccaacctggagatcaagaagctgctggaggaggtgaaggagaagaaccccaagctgaccatcgactgcaatgccagcggggccacagccccaccctgctgtgacttcttctgctag

SEQ ID NO: 344741 - DNA, 2019 bp, Artificial Sequence
  derived and/or modified sequence
atgaccagcccccagctggagtggaccctgcagaccctgctggagcagctgaatgaagatgagctgaagagcttcaagagcctgctgtgggccttccccctggaggatgtgctgcagaagaccccctggagcgaggtggaggaggctgatggcaagaagctggccgagatcctggtgaacaccagcagcgagaactggatcagaaatgccaccgtgaacatcctggaggagatgaacctgacagagctgtgcaagatggccaaggccgagatgatggaggaggaccggcgggcctacttcctgcggcactttggagatgaggaccaggccatgagggcctttgagctgatgaggagcaatgctgccctcttccagctgggcagcgccccagctgtgtgctggatcgtgtgcaccaccctgaagctgcagatggagaagggggaggaccctgtgcccacctgcctgaccaggacaggcctcttcctgcgcttcctgtgcagccgcttcccccagggcgcccagctgcggggggccctgcggaccctgagcctgctggccgcccagggcctgtgggcccagatgtctgtgttccaccgggaggacctggagcggctgggcgtgcaggagagtgacctgcggctcttcctggatggagacatcctgcggcaggacagagtgtccaagggctgctacagcttcatccacctgtccttccagcagttcctgacagccctcttctacgccctggagaaggaggagggagaagatagagatggccacgcctgggacattggagatgtgcagaagctgctgagcggggaggagcggctgaagaacccagacctgatccaggtgggccacttcctgtttggcctggccaatgagaagagggccaaggagctggaggccaccttcggctgcaggatgagcccagacatcaagcaggagctgctgcagtgcaaggcccacctgcacgccaacaagcccctgtctgtgacagacctgaaggaggtgctgggctgcctgtatgagagccaggaggaggagctggccaaggtggtggtggcccccttcaaggagatcagcatccacctgaccaacaccagcgaggtgatgcactgcagcttcagcctgaagcactgccaggacctgcagaagctgagcctgcaggtggccaagggcgtcttcctggagaactacatggactttgagctggacattgaatttgagcgctgcacctacctgaccatccccaactgggcccggcaggacctgcggagcctgcggctgtggacagacttctgcagcctcttcagcagcaacagcaacctgaagttcctggaggtgaagcagagcttcctgagtgacagctctgtgcgcatcctgtgtgaccacgtgaccaggagcacctgccacctgcagaaggtggagatcaagaatgtgaccccagacacagcctacagagacttctgcctggccttcatcggcaagaagaccctgacccacctgaccctggccggccacatcgagtgggagaggaccatgatgctgatgctgtgtgacctgctgaggaaccacaagtgcaacctgcagtacctgcggctgggcggccactgtgccaccccagagcagtgggccgagttcttctacgtgctgaaggccaaccagagcctgaagcacctgcggctgagcgccaacgtgctgctggatgagggcgccatgctgctgtacaagaccatgacccggcccaagcacttcctgcagatgctgagcctggagaactgccgcctgacagaggccagctgcaaggacctggccgctgtgctggtggtgtccaagaagctgacccacctgtgcctggccaagaaccccatcggggacaccggggtgaagttcctgtgtgagggcctgagctacccagactgcaagctgcagccccacaagccaggcctggagtaccagcctgacagctcctggatcgtggacagcctgagcggcatccgggagagcaagctgtag

SEQ ID NO: 344742 - DNA, 2943 bp, Artificial Sequence
  derived and/or modified sequence
atgaccagcccccagctggagtggaccctgcagaccctgctggagcaactgaatgaggacgagctgaaatcatttaagagcttgttgtgggcctttccactggaggacgttctgcaaaaaactccctggagcgaggtggaggaggctgatggcaaaaagctagcagagatcctcgtaaacacctcgtcggagaattggataagaaatgcaaccgtgaatatcctcgaagagatgaacctgacagagctatgcaagatggctaaggcagaaatgatggaagatgggcaggtccaggaaatagacaaccctgagcttggggatgctgaggaggactctgagctcgccaaacccggagagaaggagggctggagaaactcaatggagaaacagtcgttagtctggaagaacactttctggcaaggcgatatcgataatttccacgatgacgtgactctgcgcaatcagcgattcatcccatttctgaacccgcgcacccctaggaagctgaccccttacacggttgttctacacggtcctgccggagtgggcaagacgaccctcgccaagaaatgcatgctggattggaccgactgcaacctttctcccactctccgctatgccttttatctctcatgtaaagaactttcccggatgggaccctgctcctttgctgaactcatctctaaggattggcccgaactgcaggacgacatacccagcattctcgctcaggcacagcgcatcctgttcgtagtggacgggttagatgagcttaaagttccaccaggcgcactcatacaggacatctgtggcgattgggagaagaaaaaaccagtaccggtgcttttagggagcctgttgaaacggaagatgctgccccgcgccgcactgctggtcaccacacggccccgagcgctgcgggatctgcagctgctggcccagcagccaatctacgtgcgtgtagaaggattcctcgaggaagataggcgagcttacttcctgcggcatttcggagatgaagaccaagcgatgcgagcattcgagctcatgcgaagtaatgctgccttgttccagctagggagcgcacccgccgtgtgttggatcgtctgtactactctgaagttgcagatggagaagggggaggaccctgtacccacctgtctaacccgtacaggcttgttcctgaggttcctgtgcagccgctttcctcaaggtgctcaactacggggcgccctaagaacgctgtcactgctagccgctcaagggctgtgggcccagatgagcgtttttcaccgagaagacctggaaagacttggagtgcaggagagcgatctgcgccttttcctggacggcgacatccttcgtcaggatcgagtgtccaaaggctgctacagctttatccatctttccttccagcaattcctgacagccctcttctatgctctggaaaaggaggaaggagaggatcgtgatggccacgcatgggacatcggagacgtccaaaagttgctatccggcgaagaacgcctcaagaacccggacttaatccaggtcggtcacttcctgttcggtctggccaacgagaaacgcgccaaggagctagaggccaccttcggatgccgcatgtctcctgacataaagcaggaactgcttcagtgcaaagctcatttgcacgcaaataagcctctgtcggtcactgaccttaaagaagtcctcggctgcttgtacgaatcacaggaagaagagttagcaaaggtcgtggttgccccttttaaagagatatccattcatctaaccaacaccagcgaagtcatgcactgctccttcagcctgaagcattgccaagatcttcagaaactgagccttcaagtggctaagggggtgttcctggaaaactacatggacttcgagctggatatcgaatttgaacgatgtacatatttgacaatacccaattgggctcggcaggacctacgctctctgcgcctctggactgacttctgttcccttttttcgagcaactcgaatctaaagttcctcgaagtcaaacaatctttcctaagcgattcctccgtccgcatcctttgcgatcatgtcactcgtagtacttgtcacctccagaaggtggagattaaaaatgtcactcccgatactgcatatagagacttctgtttggcctttattggaaaaaaaactctcacccacttaaccctagccggacacatcgagtgggagagaaccatgatgctgatgctgtgtgatttgcttcgaaatcacaagtgtaacctgcagtacctccgtctgggagggcattgcgccacccccgaacagtgggcggagttcttttatgtgttgaaggccaaccagagtttgaaacaccttcggctgagcgcgaatgtgcttctggatgagggtgcaatgctcctttataagactatgacccgtcccaagcattttctccaaatgttgtctcttgaaaactgtcggttgaccgaggcaagttgtaaggatctggcggccgttctggttgtgtcgaaaaaactgactcacctgtgcctggcaaagaaccctataggagacaccggggtgaagttcttatgtgaaggtcttagctacccagactgtaaactccagacccttgtactgcaacaatgttccataactaaattaggttgtcgctacctgtcggaggccttgcaggaagcttgctcactcacaaacctggacctgagcattaatcagattgcccgcgggctctggatcctgtgccaggctctcgagaatccaaactgcaacctgaaacatctgaggctcaagacatacgagactaatttggaaatcaagaagctcctagaggaggttaaagaaaagaacccaaaactgacaattgactgtaacgcttcaggcgcaacggccccgccatgttgtgactttttctgctag

SEQ ID NO: 344743 - DNA, 2943 bp, Artificial Sequence
  derived and/or modified sequence
atgaccagcccccagctggagtggaccctgcagaccctgctggagcagctcaatgaagacgaactcaagtctttcaagtctctattgtgggcgtttcccctggaggatgttctacagaagactccttggtctgaagtagaagaggcggatggcaagaaacttgctgaaatcctcgtcaacacatcgtcagagaattggattaggaatgccacggtgaacattctggaagaaatgaacctgacagagctgtgcaaaatggcaaaagccgaaatgatggaggatggtcaggtgcaggagatagacaatcctgaattaggagatgcagaggaggactcagagttggcaaaaccgggtgaaaaagaagggtggagaaacagcatggagaagcagagcttggtgtggaagaacaccttttggcaaggcgacattgacaatttccacgacgacgttacactgcgaaatcagagattcatcccatttctgaatccacgcacgccacgcaagctcaccccttataccgtcgtgctccacggacctgctggggttggcaaaacaactttagcaaaaaaatgcatgttggactggacagactgcaacttgtcacctaccctcaggtatgctttctacctgagttgcaaagagctctccaggatggggccttgtagttttgcagagctaatctccaaagactggcccgagttgcaagatgatatcccttccatcctcgctcaggcgcagaggatactcttcgtggttgacggactggacgaattaaaagtccctcctggcgctctgatccaggatatctgcggggactgggagaagaagaagccagtaccagtgctcctgggctccctgctcaagcgcaagatgttacctagagcggctctgctggtcacgacacgacccagggcactgcgggacctgcagctgctggctcagcaaccgatctatgtcagagttgagggctttctggaagaggataggagagcatatttcttgagacactttggagacgaagatcaggccatgagggcgttcgagctgatgcgtagtaatgccgctctgtttcagttggggtcagcaccggcagtatgttggatcgtctgcacaaccctgaaactccagatggaaaagggagaggatcctgtacccacctgcctgacgcgcacaggccttttcctgcgctttctctgttcccgctttccacagggggctcaactgcgcggagcgttaagaacattgagcctcctcgcagcccagggcctctgggcccaaatgtccgttttccaccgcgaggacctagaacggcttggggtccaggaaagcgatttgaggctgttcctggacggcgatattttacgacaggaccgagtgagtaaaggatgctactcattcatccatctgagctttcagcagttcctgaccgcacttttttatgcgttagaaaaggaggagggggaggatcgagacgggcacgcatgggacattggagatgtgcagaagctactgtcaggcgaggagagactgaagaaccctgacctcatccaagttggccacttcctattcggactcgccaatgaaaaacgagccaaggagctggaggccacttttggctgtcgaatgagtccagatatcaagcaggagctgctccagtgtaaggcacaccttcacgcaaataaacctctgtctgtcaccgaccttaaggaggtcctgggatgcttgtacgaatctcaagaagaggaactggccaaagtggtggtagcaccctttaaggaaataagtatacatctgacaaataccagtgaagtgatgcattgctcctttagcttaaaacactgtcaggacctgcagaaactgagtctgcaggtggctaagggagtgtttctggaaaattatatggattttgaactagacattgaatttgagcggtgtacttaccttacaattcctaactgggctcgacaggacttacgttccttgagactgtggaccgatttctgtagtctgttctcctccaactcgaatcttaaattccttgaggtgaagcagtcatttctgagcgacagctccgttagaattctctgcgatcatgtgaccagatcaacgtgccaccttcaaaaagttgaaatcaagaacgtaacacctgatacagcataccgtgacttctgcctggcctttatcgggaaaaaaaccttaactcatctgactctggctggccacattgagtgggagaggactatgatgctgatgctttgtgatctccttagaaaccataagtgcaacctgcagtacctgcgtctagggggacattgtgcaacacctgaacagtgggccgagtttttttatgtcctgaaagctaatcagtcgctgaaacacctgaggctgtcagcgaacgtcctgctcgacgaaggcgctatgctgctgtataagacaatgactcggcctaagcactttctgcagatgctgtcattggaaaattgtaggcttactgaggcaagctgcaaggacctcgccgctgttttggtggtctcaaaaaaactcacacatctgtgtctggctaagaaccctatcggcgatacaggggtgaagttcttgtgcgagggcttgagttacccagattgcaagctccagacattggtgctgcagcaatgctcgataactaaactcggctgccggtacctctccgaggcgctacaggaggcatgttcattgaccaatttagacctcagcattaaccagatcgctagggggttgtggattctgtgccaggcacttgaaaatcccaattgtaatctgaaacacctgagactgaagacttatgaaacgaatctcgaaatcaagaaactgctggaagaggtgaaagaaaaaaaccccaaattaactatcgattgcaatgcctcaggcgcaaccgcccccccatgttgtgatttcttctgttag

SEQ ID NO: 344744 - DNA, 2943 bp, Artificial Sequence
  derived and/or modified sequence
atgaccagcccccagctggagtggaccctgcagaccctgctggagcagcttaatgaggacgaacttaaaagtttcaagagtctgctctgggctttccctttggaagacgtcctccagaaaactccctggagcgaagttgaggaagcagacggcaagaagttagccgaaatactggtgaatacaagcagtgagaactggatcagaaatgcaacagtgaacattttagaagaaatgaatctgacagagctgtgcaaaatggcgaaagctgagatgatggaagacggccaggtgcaggaaatcgacaaccctgagctaggagacgctgaggaggattctgagctggcaaaacctggtgaaaaggagggctggaggaacagcatggagaaacagtctctggtatggaagaacactttttggcagggcgatatcgacaacttccatgacgacgtaactctccgcaaccagcgattcattccctttttgaacccacgcacaccccggaagcttacaccctatacagtggttctgcacggccccgcaggcgtcggaaaaacaaccttggccaaaaagtgtatgctggattggacagattgtaacttgagccctacgctgagatacgccttctacctgtcatgtaaagaactttcaagaatgggtccctgcagcttcgcagagttgatatctaaagactggccagagcttcaggacgacattccgagtatcttggcacaagctcagagaatcctctttgtggtagacggcttagatgaattgaaggtgccacctggggccctgatacaagacatttgcggcgattgggagaagaaaaaaccagtgcctgtgctgctggggagcttactcaagagaaaaatgctcccgagagccgccctacttgtgacaacccgcccacgagcccttagagatttacagcttctggcccagcagcctatttacgtgcgggtcgagggttttctggaggaagatcgtagagcttactttctgagacacttcggagatgaagatcaggccatgagggcgtttgaactcatgcgttctaatgctgctctgttccagctaggcagtgcccctgcagtctgttggatagtgtgcaccacgctgaaacttcagatggaaaaaggggaggaccctgtgccaacatgcctgacccgtaccgggctgttccttaggttcctgtgttcgagatttcctcagggggctcagctccggggtgcattgagaaccctatctcttctcgcagctcagggtctctgggctcaaatgtccgtatttcaccgagaggacctagaaagactaggcgtgcaggaatcagatctcaggctgtttctggatggggacattctgcgccaggaccgagtaagcaaggggtgctactccttcatccatctcagcttccaacaatttctgacggcactgttctacgctctggaaaaggaggaaggagaggatagggatggccacgcatgggacatcggcgatgtccagaagttgttaagtggcgaggaaaggctcaagaatcctgatctcatccaggtggggcacttcctgtttgggctagccaatgagaagagagcaaaagagctagaagctacctttggctgcaggatgagcccagacatcaaacaggaactacttcaatgcaaggctcaccttcatgctaataagccactctctgtcaccgacctcaaagaagttttgggatgcctctatgaatctcaagaggaggagcttgctaaagtggttgtcgctcctttcaaggaaatctcaatccacctaacgaatacgtccgaagttatgcactgtagcttttccttaaaacactgccaggatctgcagaaactcagtcttcaggtggcaaagggcgttttcttggagaattacatggatttcgagctcgacatcgagtttgaaagatgcacatacctgaccatccctaattgggctcgacaggaccttcgatcgttacggctctggactgatttctgttcattgttctcgagcaactccaacctcaagtttctggaggtgaaacagagctttctcagtgacagcagtgtaagaatcctgtgcgaccatgttactagaagtacctgccacctgcagaaggtcgaaatcaagaatgtaaccccagatacagcgtaccgggatttttgcctagcatttataggaaaaaaaacactgacacacctcaccctcgcagggcatattgagtgggagagaaccatgatgctgatgctctgcgatctgctgcgcaatcacaagtgtaatttgcagtacctgcggctcggaggccattgtgcaacaccggaacagtgggccgagttcttttacgtcctcaaggcaaaccagagcctcaaacacctgaggctctctgctaacgtgctcctcgacgaaggcgccatgctgctgtacaagacaatgaccaggccgaaacactttctccagatgctttccttagagaactgccggctaactgaggcctcctgcaaagatcttgccgccgtgctagttgtgtcgaagaaactgacgcacttatgcctcgccaagaatccaatcggtgatactggggttaaattcctttgtgaaggcctgtcttacccagactgcaagttacaaactctggttctgcaacagtgcagtattaccaagctgggatgccggtatctgagtgaggcactgcaggaagcctgctctctgactaatctcgatctctctattaaccaaatcgcgcgcggcctgtggatcctttgccaagctttagagaaccctaactgtaacctgaagcatctacgcctgaaaacatacgaaaccaatttggagataaagaagcttttggaagaggtaaaggagaagaaccctaagctcacgattgactgtaatgcatctggcgccactgcccctccttgctgcgatttcttttgctag

SEQ ID NO: 344745 - DNA, 2943 bp, Artificial Sequence
  derived and/or modified sequence
atgaccagcccccagctggagtggaccctgcagaccctgctggagcaactcaacgaagatgaactgaagtcttttaagagcttactgtgggctttcccattggaggatgtgctccagaagacaccctggtcggaggtggaggaagcagatggtaagaaactggctgaaatactcgtaaatacaagcagcgagaactggatcaggaacgccaccgtgaatatactggaggagatgaatttgaccgaactgtgcaagatggcaaaagcagagatgatggaagatggccaggtgcaggagattgacaatcccgagcttggggatgccgaggaagattctgagctggccaaacctggagagaaggaggggtggagaaatagcatggaaaaacaaagcctagtttggaagaatacattttggcaaggtgacattgataatttccacgatgacgttacactacgaaaccagaggtttattcccttcttgaatcctcgaaccccacggaagctgacaccttacacggttgtgctccacggccctgcaggagtcggcaagacaaccctagccaaaaagtgcatgttggactggactgactgcaacctgtccccgacactgagatacgccttttacttgagctgcaaggagctgtctcgtatgggcccatgctccttcgccgagctgatttctaaggactggccagagctgcaagacgatatcccttcaatcctcgcacaggcccagcgtattctgttcgttgttgatggtctggacgaactgaaggtcccgcccggggctctgatacaggacatttgtggcgactgggagaagaaaaaaccggtcccggtgttgctgggatccctgctgaagcgtaagatgctgcctcgcgcagccttgctggtgaccacccgccccagggccctgcgcgatcttcagctgcttgcccagcaaccaatctatgtgcgggtcgaaggctttttggaagaagatagaagggcgtacttcctgcggcacttcggggatgaagaccaagcaatgagggcattcgaactaatgcgatccaatgcagctctcttccagctcggctctgcaccagctgtttgttggatcgtctgtacaactctgaagctccagatggaaaagggggaagaccccgtgcccacttgcctcacccggaccggactcttcttacgctttctgtgcagccgcttcccacagggcgcccagttgagaggtgccctgcgcacactgagtctgctcgctgctcaaggcctgtgggcacagatgtcagtattccacagggaggatctggagagactgggtgtgcaggaatctgatcttaggttatttctggatggagacatactacgccaagatcgagtgagtaagggctgttacagtttcattcacctctcctttcagcaattcttgaccgctctcttctatgcactggagaaagaggagggagaggatcgcgatggtcatgcttgggacataggcgacgtgcagaagttacttagtggtgaagagcgcctgaagaaccccgatctgattcaggtcggccactttctgttcggcctggccaatgagaaaagggcgaaggaactggaagcaacgttcgggtgtagaatgtcacctgacattaagcaagaactgctgcagtgcaaggctcaccttcatgccaataaacctctttccgtgacagatttgaaagaggtcctcggctgcctttatgagagtcaggaggaggaactggccaaggtggtagtcgcccctttcaaggagatatccattcacttgacaaacacttctgaggtgatgcactgttccttttcactcaaacactgtcaggacctccagaagttgagcttgcaggtggccaaaggcgtgttcctcgaaaattatatggactttgagctggatatcgaattcgaaaggtgcacctacctgactatacccaactgggctcggcaagaccttagatccctgagactctggacagatttttgcagtcttttctcatccaatagtaacttaaaatttttagaagtaaagcaatcctttctgtccgacagttcagtgcggattttatgcgatcacgtgacccggagcacctgccatttacagaaggtagaaattaagaacgtgaccccggacaccgcttatagagatttttgtctagctttcattgggaagaaaacactcacacaccttacacttgctggacacattgaatgggaacggactatgatgctgatgctgtgcgacctcctgcgtaatcataaatgtaatctgcagtacctcaggctaggagggcactgcgcaacacctgagcagtgggcagaattcttttatgtgctgaaggctaatcagtccctcaaacacctgaggctatccgccaacgttctgctcgatgaaggagctatgcttctctataagaccatgacccgtcctaagcatttcctccaaatgttatctctcgaaaattgtcggctgactgaggcatcttgtaaggacttggctgcagtactggtggtgagcaaaaaactcacccacctctgtcttgccaaaaaccctatcggggacacaggtgtgaagtttctgtgcgaaggtctttcctatcctgattgcaagctgcaaacactggtgctgcagcagtgctctatcacgaagctaggctgccggtatctcagtgaggccttacaggaagcttgctccctcacgaacctggacctttcaattaaccagatcgccagaggtctctggatcctctgtcaggcgttagagaaccccaattgcaacctgaagcatctgcggctgaagacctacgagacaaacctggaaatcaagaaactgctggaggaggttaaagagaagaatccaaaattaaccatcgactgcaatgcttcgggagcaacagcacctccttgttgtgactttttctgctag

SEQ ID NO: 344746 - DNA, 2943 bp, Artificial Sequence
  derived and/or modified sequence
atgaccagcccccagctggagtggaccctgcagaccctgctggagcaactcaacgaggatgaactgaagagcttcaaatccttattgtgggcgttccctctggaagacgtcctgcagaagacaccttggtcagaagtggaagaggccgacgggaagaaactagctgagatcctggtgaacaccagctcagagaactggatccggaatgcgactgtgaacatcctcgaggagatgaacctgacggagttgtgtaagatggcgaaagccgagatgatggaggacgggcaagtacaggagattgacaatccggaactaggagacgccgaagaagattccgagttggccaaacctggcgaaaaggagggatggcgcaactctatggagaaacagagtcttgtgtggaaaaataccttctggcagggggatatcgacaacttccacgacgacgtcactctacggaaccagcggtttattccttttctgaatccccggacgccccgaaaactgacaccgtataccgtggttttacacggacctgctggggtgggcaagaccaccttagcaaaaaaatgtatgcttgactggacggactgcaacctgtcgcctactttgaggtacgcgttctacctctcttgtaaagagctgtcgcggatgggtccatgctcattcgctgagttgatctccaaagactggccagagctgcaggacgacatccccagcattttggctcaggctcagcgcatactgtttgtcgtggatggactcgacgaactcaaggtcccaccaggtgcgctgatccaggatatctgcggggattgggaaaaaaaaaagccagtacccgttttgcttggcagccttctgaagcgaaagatgttgcccagggcagctctcttggtgacaacacgtccccgggctcttagggacctacaattgctggctcagcaacctatatacgtccgcgtggaagggtttctggaggaggaccgcagagcgtacttcttgagacactttggggatgaagatcaggcaatgagagcctttgaactgatgagatctaacgccgcactgtttcagctaggttccgcccctgctgtttgttggatcgtctgtacaaccctaaagctacaaatggagaagggtgaggacccagtgcccacttgtttgactcggacaggattgtttctgcgcttcctatgctctcgatttcctcaaggcgcccagttgcggggagcattgagaactctgtctctgcttgcggcccagggtctttgggctcagatgagtgtgtttcatcgggaagatcttgagcgcctgggcgtgcaggaatccgaccttcgcttattccttgatggagatatcttgcgccaggatcgggtttcaaagggttgctacagtttcatacaccttagcttccagcagttcctgaccgccttgttttacgccctcgagaaagaagaaggcgaggatagggacggccacgcttgggatattggagacgtgcagaagttactttccggcgaggagcggctcaaaaacccagatctcatccaggtgggacatttcttgttcggccttgctaacgagaaacgagcaaaggagcttgaggcaacttttggatgccgaatgtcacccgacattaagcaagagctgttgcagtgcaaagctcatcttcatgctaacaaaccgctctctgttaccgacttgaaggaagttcttggctgtctgtacgaatcgcaggaagaagaattagctaaagtggttgtggcacccttcaaagagataagcattcacctgactaacaccagcgaagtgatgcattgtagcttctcactgaaacactgtcaggacttacaaaagttatcgttgcaggttgctaagggtgtttttctcgagaactacatggacttcgaactcgatatcgagttcgagcgttgcacttacctcactattcctaattgggctaggcaggacctgcgttccctgcgcttatggacagatttttgctccctattctcttcaaattcaaacttaaagttccttgaggtcaaacagtctttcctgagtgatagttccgtgcgaatcctctgcgatcacgtgacccgcagtacctgtcatttgcaaaaggtggagatcaaaaacgttacaccagatactgcgtaccgggatttttgtttggcctttatcggcaagaagactctcacccacttgactctggcaggccacattgaatgggagaggaccatgatgcttatgctgtgtgacctgctacgtaaccataagtgcaacctgcagtacctgaggttggggggccactgtgccactccagagcagtgggccgaattcttttatgtgctaaaagccaaccaatccctaaaacatctgagactcagtgccaacgtgttgttggatgagggtgccatgctcctgtataaaactatgaccagacccaaacatttcctgcagatgctgtccctggagaactgtaggctaacggaggcatcctgcaaagacctggcagcagtccttgtagtttctaagaagctgacccacctgtgtttagctaaaaaccctatcggagataccggcgtgaaattcctctgcgagggccttagctatccagactgtaaactgcaaacacttgtgctgcagcagtgttccataacaaaacttggatgccgttacctcagcgaggcactccaagaagcttgttcactgacgaatctagatctgtcaataaaccaaattgcgcgggggctgtggatcctttgtcaggcgctggagaacccaaattgtaacctcaagcacctacgcttgaagacctacgagactaacctggagatcaaaaagctgctggaggaagtcaaggagaaaaatccaaagttgactatcgattgtaacgcaagcggagcgactgcacccccctgctgtgatttcttttgttag

SEQ ID NO: 344747 - DNA, 2943 bp, Artificial Sequence
  derived and/or modified sequence
atgaccagcccccagctggagtggaccctgcagaccctgctggagcagcttaatgaggacgagctcaaatcttttaaatcattgctctgggctttccccctagaggatgtgttgcagaaaacgccatggagcgaggtcgaggaggccgacggcaagaagctcgccgaaatcctggtgaatacaagcagcgagaattggattcggaacgccaccgtcaacatactcgaagaaatgaatctgacagagctgtgtaagatggccaaagcagaaatgatggaggacggccaggtgcaggagatcgacaatccggaactgggcgatgcagaagaggattccgaacttgcaaaacccggagaaaaggaaggatggcggaattccatggagaaacagagtctcgtgtggaaaaatacgttctggcagggcgacatcgataactttcatgatgacgtgaccctaagaaatcagaggttcatcccctttctgaatccccgaaccccaaggaagttgaccccttatactgtggtgttgcacggccctgccggcgtagggaaaacaacactcgcaaaaaagtgtatgctcgattggaccgactgtaatttgtccccaaccctgagatacgcattttacttgtcctgtaaggagctgtcacgcatggggccatgtagttttgctgaacttattagcaaggactggccagaactgcaggatgacatcccctctatcctcgcccaggcccagcggatactgtttgtggtcgacggtctggatgaactgaaggtgcctcccggcgcactgatccaagacatctgcggggattgggagaagaagaagcctgtcccagtcctgctaggtagcctgttgaaaagaaaaatgctacctagagctgcattactcgtgacaacccggcctcgagcactacgcgacctgcagttactggcccaacagccaatctacgttagggtggaaggctttctagaagaggataggcgcgcatattttctgcggcactttggagatgaggaccaagctatgagagcttttgagctgatgcgtagcaatgccgccctttttcagctcggttcagctcccgctgtgtgttggattgtgtgtacaacactcaaactccagatggagaagggagaggacccagtgcccacttgtctgacccgaaccggtctgttcttgcggtttctatgctctcggttccctcaaggggctcaactgcgaggagccctccgaacacttagtctcctggccgcccaagggctgtgggctcagatgtcagtctttcatagagaggaccttgaacgactcggtgtgcaagaatcggacctgcgcctattcctcgatggtgatatcctgaggcaggatagagtgtcaaaagggtgctactcctttatccatctcagctttcaacaattcctgaccgcactgttctatgccctggagaaagaggagggcgaggaccgggatggccatgcatgggatattggcgacgttcagaaactcttgtcaggcgaagagcgcctcaaaaatcccgacctgattcaagtggggcacttcctgtttggcttagcaaatgaaaagcgtgccaaggaacttgaggcgacgttcggctgccgcatgagccctgacattaaacaagagctgttgcagtgcaaggctcatctccacgccaataaacccctgagtgtcaccgacttgaaggaagtgctgggctgtctatacgaatctcaggaggaagaactcgctaaggtggtggtggctccattcaaggagatcagtatacatctgacaaatacgagtgaggtcatgcactgtagcttctccttaaaacactgtcaagacttgcaaaaactgtcactgcaggtcgcaaagggcgtgtttcttgagaactatatggactttgaactggatattgagttcgagcggtgtacatatctgaccatccctaactgggcccgacaggacctgcgatcactgcggctgtggaccgatttctgcagcctgttctccagtaattccaacttgaagttcctggaggtgaagcaaagtttcctctccgattcttcggtgcgcattttgtgcgaccacgtgactaggtcaacttgccacctgcagaaggtggaaattaaaaacgttacgcccgatactgcttaccgggacttctgccttgcttttattggtaaaaagaccctcactcatctcacactggctggtcatattgaatgggagagaaccatgatgctcatgctatgcgacttgttgcgaaatcataagtgtaacttgcagtaccttcggctcggagggcattgtgccactcctgaacagtgggctgaatttttctacgttttgaaagcaaaccagtctttgaaacacttacgtctgagcgctaacgtcctcctggacgagggggcaatgctattgtacaagacaatgaccaggcctaagcatttcctgcagatgctgagcttggaaaactgtaggctgacagaagccagctgtaaggatctagccgccgtcctcgtcgtcagcaagaagttgacccatctttgcctggcaaaaaatcctattggcgacacaggtgtcaaattcctctgtgagggcctgagttaccctgattgcaagctgcaaaccctagtgctgcaacaatgttctattaccaaattggggtgcagatatctcagcgaggcactacaagaagcatgtagcctcactaatctggatctgagcataaatcaaattgccagaggactctggatcctgtgtcaggccttagagaatcctaactgcaatctcaaacatctccgactcaaaacatatgaaaccaatttggagattaagaaattgctcgaggaggtgaaagaaaagaatcccaagttgacaatcgattgtaatgcgtctggagcaaccgcaccaccttgttgtgactttttctgttag

SEQ ID NO: 344748 - DNA, 2943 bp, Artificial Sequence
  derived and/or modified sequence
atgaccagcccccagctggagtggaccctgcagaccctgctggagcaactaaacgaagacgagctgaagtccttcaaatccctgctatgggctttccccctggaggatgtgctgcaaaaaacaccgtggtcagaagttgaagaagccgatggcaagaaattggctgagatcctcgtgaataccagttcggaaaactggatcagaaatgccaccgtgaatattctcgaagagatgaacttgaccgagctctgcaaaatggcaaaagccgaaatgatggaggacggccaggtgcaggagattgacaatccggagctaggggacgccgaagaggatagcgaacttgcaaagccgggagagaaggaaggctggagaaacagcatggagaaacagagcctcgtgtggaagaacaccttttggcaaggggatatcgataacttccatgacgatgttactcttaggaaccaaagatttataccctttctgaacccaaggacacctcgcaagctcacgccatacaccgtggtgctccatgggcctgccggcgtgggcaaaaccactctcgccaaaaagtgcatgcttgattggaccgactgtaacctaagcccaacactgcgatacgctttttacttgtcctgtaaagaactgtccaggatgggcccttgctcattcgcggaactgattagcaaggattggcccgagttacaggatgatattccgagtatactagctcaggcccagagaattctctttgttgtggatgggctggatgagctgaaagtgccccccggcgccttgatccaagatatctgcggagactgggaaaagaaaaagccagtgcccgttctgctgggttcactactgaagaggaaaatgctccctcgtgccgcactattggtaacgaccaggcctagggctctacgggatctgcaactgctagcgcagcagcccatttacgtccgcgtagaaggtttcctagaggaagatcggagggcgtattttctgcgtcactttggcgatgaggatcaggccatgagggccttcgagctgatgaggagcaacgctgccttgtttcagttagggagcgctcccgctgtgtgctggattgtatgtacaactctgaagctgcagatggaaaagggagaagacccagtacctacgtgtctaactagaacaggcttgtttctccgatttctgtgctccagatttccacaaggggcacaactccggggggcgttacggactctcagcttgctcgcagcacaggggctatgggcacagatgagcgtatttcacagagaagatcttgagcggctgggcgtgcaggaatcagatttgcgcctgtttctggacggggatatcttgaggcaggaccgagtttccaagggctgttatagcttcattcacctgtctttccagcagttccttacggccttgttttacgcactggaaaaagaggaaggcgaggatcgcgacggccatgcctgggatattggggatgtccagaaattgctctccggggaagaacgactgaagaatcctgacctcattcaagtgggccatttcctgttcggtctcgccaatgaaaaacgggcgaaggagctggaggcaacattcggctgtcgtatgagcccggatattaaacaggagctgctgcagtgcaaagctcatttgcatgccaacaaaccattgagcgtcacggacctgaaggaggtcctagggtgtctctatgaatctcaggaagaagagcttgcaaaggtcgtggtggcccccttcaaagagatctcaattcatttgacaaacacatccgaggttatgcactgctcgtttagcctgaagcattgccaggacttgcagaagctgagtcttcaggtggccaaaggcgtattcctcgagaattacatggacttcgagttagacatcgagttcgaaaggtgcacgtacctgacgatcccaaactgggcccgacaggacctgcggagtctgcggctctggactgatttttgcagcctgttctcttccaattcaaacctgaaattcctagaggtcaagcagtcttttctctctgatagcagcgtgcgaatcctgtgtgaccacgtgactcggtctacttgtcacctccagaaggtggaaatcaagaatgttacgccggataccgcgtaccgagatttctgcctggcgttcattggaaagaagacattaacacacctcacgctggctgggcatatcgaatgggagaggactatgatgctgatgctgtgcgacctgctgagaaatcataagtgcaatctgcagtacttaaggctcggcggacattgtgccaccccggagcaatgggccgagttcttttatgtgcttaaagctaaccaatcactgaagcatctgaggttgtccgctaatgtgctgcttgacgagggagcaatgctgctttataagacaatgaccaggccaaagcatttcctgcagatgctgtcacttgagaactgccgcttaactgaagcttcatgcaaggacctcgcggctgtacttgtagtgtctaagaaactcactcatctttgtttggctaagaatcccattggcgatacaggggtcaagttcctgtgtgagggcctgagttatccagactgcaaattgcagaccctggtgctgcagcagtgttcgataactaaactcggctgccgatacctcagtgaagcccttcaggaggcctgcagcctcaccaatctggatctcagtattaatcagatagcaaggggcttgtggatactctgccaggcactggagaacccgaactgcaatctgaaacacctaagacttaagacctatgagacaaacctcgagatcaagaagctattggaggaggttaaagaaaagaaccccaagttaacaatcgattgcaatgcgagtggggcaaccgcacctccatgctgcgactttttttgttag

SEQ ID NO: 344749 - DNA, 2019 bp, Artificial Sequence
  derived and/or modified sequence
atgaccagcccccagctggagtggaccctgcagaccctgctggagcagttgaatgaagatgagctgaagtctttcaaatcacttctgtgggcctttccactggaggatgtgctccagaagactccatggtcggaggtggaggaagccgacggaaagaaacttgcagaaatcctggtgaacacgtcctctgaaaactggatccggaacgctactgtgaacatactagaagaaatgaacctaacagaactttgtaaaatggccaaggctgagatgatggaggaggatcgacgcgcttacttcctgcggcatttcggagacgaagaccaggcgatgagggcgttcgagctcatgcgcagtaacgcggccctcttccagcttggcagcgcccctgcagtgtgctggattgtgtgtaccactctgaaactccaaatggaaaagggagaagaccccgtgcctacttgtctaaccagaactggcctgttcctgagatttctgtgtagtaggtttccacagggcgcccagctgagaggggcgttgagaacactgtcgttacttgctgcgcagggactctgggctcagatgagtgtctttcaccgagaagatttggaacggctgggggtgcaggaatctgacctgcggctgttcctagacggcgatatcctcaggcaggatagggtatcgaagggatgctattcctttatccacctcagcttccagcaatttcttaccgcattgttctacgctttggaaaaagaagaaggagaggatagagatggtcatgcctgggatatcggggacgtccagaagctactgagtggcgaagagcgcttgaaaaacccagatttgatccaggtgggccattttctgttcggcctcgctaatgagaaacgagctaaagaattggaggcaaccttcggatgtagaatgtccccagatatcaagcaggaacttcttcagtgcaaggcccatctgcacgcaaacaaacccttgtctgtaactgacctgaaggaagtgctcggttgcctctacgagtcacaggaggaagaactggcgaaagtcgtcgtggccccattcaaagagatttccattcatctgacaaatacaagtgaagtcatgcactgttcattctcactcaagcactgtcaggatctccagaaactatcgctgcaagtcgccaagggagtgtttcttgaaaactatatggattttgagctcgacatagagtttgaacgctgtacttacctgaccatacctaattgggcacggcaagaccttcggtctctgaggctctggacagatttttgctcactattttcgtccaactccaacctcaagtttctcgaagtgaaacagagctttctctccgacagtagcgttagaatactttgtgaccacgttacacgctctacttgtcatctccaaaaagtcgagatcaagaacgtgaccccggatacagcttatagagatttctgtcttgcctttatcggaaagaaaaccttgacccatcttaccctcgctggacacatagagtgggagcgaaccatgatgttaatgctttgcgatctgttgcgcaatcataaatgtaatctgcagtacctgagacttggtggccattgtgccacgcccgaacagtgggccgagtttttctacgtgctgaaagcaaaccagagtctgaagcacctgaggctgagtgccaatgtgttgctcgacgagggcgctatgttactgtacaagaccatgactagaccaaagcactttctgcaaatgctgagccttgagaactgtagactgaccgaagcctcctgtaaggatctggcggcagttcttgtggtgtccaaaaaacttactcacctgtgcctggccaagaaccccatcggtgataccggagtgaagtttttgtgtgaaggtctgagttaccccgattgcaaacttcagccgcataagcccggcctggagtaccagcctgattcatcttggatcgtggattctcttagcggcatcagggaaagcaagctgtag

SEQ ID NO: 344750 - DNA, 3250 bp, Artificial Sequence
  derived and/or modified sequence
gaaacacaggctggaagcaagacctgacctgagggagttcttcagccttaacctaaggtctcatactcggagcactatgacatcgccccagctagagtggactctgcagacccttctggagcagctgaacgaggatgaattaaagagtttcaaatcccttttatgggcttttcccctcgaagacgtgctacagaagaccccatggtctgaggtggaagaggctgatggcaagaaactggcagaaattctggtcaacacctcctcagaaaattggataaggaatgcgactgtgaacatcttggaagagatgaatctcacggaattgtgtaagatggcaaaggctgagatgatggaggacggacaggtgcaagaaatagataatcctgagctgggagatgcagaagaagactcggagttagcaaagccaggtgaaaaggaaggatggagaaattcaatggagaaacagtctttggtctggaagaacaccttttggcaaggagacattgacaatttccatgacgacgtcactctgagaaaccaacggttcattccattcttgaatcccagaacacccaggaagctaacaccttacacggtggtgctgcacggccccgcaggcgtggggaaaaccacgctggccaaaaagtgtatgctggactggacagactgcaacctcagcccgacgctcagatacgcgttctacctcagctgcaaggagctcagccgcatgggcccctgcagttttgcagagctgatctccaaagactggcctgaattgcaggatgacattccaagcatcctagcccaagcacagagaatcctgttcgtggtcgatggccttgatgagctgaaagtcccacctggggcgctgatccaggacatctgcggggactgggagaagaagaagccggtgcccgtcctcctggggagtttgctgaagaggaagatgttacccagggcagccttgctggtcaccacgcggcccagggcactgagggacctccagctcctggcgcagcagccgatctacgtaagggtggagggcttcctggaggaggacaggagggcctatttcctgagacactttggagacgaggaccaagccatgcgtgcctttgagctaatgaggagcaacgcggccctgttccagctgggctcggcccccgcggtgtgctggattgtgtgcacgactctgaagctgcagatggagaagggggaggacccggtccccacctgcctcacccgcacggggctgttcctgcgtttcctctgcagccggttcccgcagggcgcacagctgcggggcgcgctgcggacgctgagcctcctggccgcgcagggcctgtgggcgcagatgtccgtgttccaccgagaggacctggaaaggctcggggtgcaggagtccgacctccgtctgttcctggacggagacatcctccgccaggacagagtctccaaaggctgctactccttcatccacctcagcttccagcagtttctcactgccctgttctacgccctggagaaggaggagggggaggacagggacggccacgcctgggacatcggggacgtacagaagctgctttccggagaagaaagactcaagaaccccgacctgattcaagtaggacacttcttattcggcctcgctaacgagaagagagccaaggagttggaggccacttttggctgccggatgtcaccggacatcaaacaggaattgctgcaatgcaaagcacatcttcatgcaaataagcccttatccgtgaccgacctgaaggaggtcttgggctgcctgtatgagtctcaggaggaggagctggcgaaggtggtggtggccccgttcaaggaaatttctattcacctgacaaatacttctgaagtgatgcattgttccttcagcctgaagcattgtcaagacttgcagaaactctcactgcaggtagcaaagggggtgttcctggagaattacatggattttgaactggacattgaatttgaaaggtgcacttacctaaccattccgaactgggctcggcaggatcttcgctctcttcgcctctggacagatttctgctctctcttcagctcaaacagcaacctcaagtttctggaagtgaaacaaagcttcctgagtgactcttctgtgcggattctttgtgaccacgtaacccgtagcacctgtcatctgcagaaagtggagattaaaaacgtcacccctgacaccgcgtaccgggacttctgtcttgctttcattgggaagaagaccctcacgcacctgaccctggcagggcacatcgagtgggaacgcacgatgatgctgatgctgtgtgacctgctcagaaatcataaatgcaacctgcagtacctgaggttgggaggtcactgtgccaccccggagcagtgggctgaattcttctatgtcctcaaagccaaccagtccctgaagcacctgcgtctctcagccaatgtgctcctggatgagggtgccatgttgctgtacaagaccatgacacgcccaaaacacttcctgcagatgttgtcgttggaaaactgtcgtcttacagaagccagttgcaaggaccttgctgctgtcttggttgtcagcaagaagctgacacacctgtgcttggccaagaaccccattggggatacaggggtgaagtttctgtgtgagggcttgagttaccctgattgtaaactgcagaccttggtgttacagcaatgcagcataaccaagcttggctgtagatatctctcagaggcgctccaagaagcctgcagcctcacaaacctggacttgagtatcaaccagatagctcgtggattgtggattctctgtcaggcattagagaatccaaactgtaacctaaaacacctacggttgaagacctatgaaactaatttggaaatcaagaagctgttggaggaagtgaaagaaaagaatcccaagctgactattgattgcaatgcttccggggcaacggcacctccgtgctgtgactttttttgctgagcagcctgggatcgctctacgaattacacaggaagcgggattcgggtctctaagatgtcttatgaatgcaggtcagagggtcacatgttaacactagagtctgtcgagaggtaggatttgacactggttttctcactatttttgggagattctgcacgagtcacgcacccccttcacatgacgctatgtactttctcacagggataataaagttagagcactctcgttgca

SEQ ID NO: 344751 - DNA, 2485 bp, Artificial Sequence
  derived and/or modified sequence
atccgtttcctttgcaggaaacacaggctggaagcaagacctgacctgagggagttcttcagccttaacctaaggtctcatactcggagcactatgacatcgccccagctagagtggactctgcagacccttctggagcagctgaacgaggatgaattaaagagtttcaaatcccttttatgggcttttcccctcgaagacgtgctacagaagaccccatggtctgaggtggaagaggctgatggcaagaaactggcagaaattctggtcaacacctcctcagaaaattggataaggaatgcgactgtgaacatcttggaagagatgaatctcacggaattgtgtaagatggcaaaggctgagatgatggaggaggacaggagggcctatttcctgagacactttggagacgaggaccaagccatgcgtgcctttgagctaatgaggagcaacgcggccctgttccagctgggctcggcccccgcggtgtgctggattgtgtgcacgactctgaagctgcagatggagaagggggaggacccggtccccacctgcctcacccgcacggggctgttcctgcgtttcctctgcagccggttcccgcagggcgcacagctgcggggcgcgctgcggacgctgagcctcctggccgcgcagggcctgtgggcgcagatgtccgtgttccaccgagaggacctggaaaggctcggggtgcaggagtccgacctccgtctgttcctggacggagacatcctccgccaggacagagtctccaaaggctgctactccttcatccacctcagcttccagcagtttctcactgccctgttctacgccctggagaaggaggagggggaggacagggacggccacgcctgggacatcggggacgtacagaagctgctttccggagaagaaagactcaagaaccccgacctgattcaagtaggacacttcttattcggcctcgctaacgagaagagagccaaggagttggaggccacttttggctgccggatgtcaccggacatcaaacaggaattgctgcaatgcaaagcacatcttcatgcaaataagcccttatccgtgaccgacctgaaggaggtcttgggctgcctgtatgagtctcaggaggaggagctggcgaaggtggtggtggccccgttcaaggaaatttctattcacctgacaaatacttctgaagtgatgcattgttccttcagcctgaagcattgtcaagacttgcagaaactctcactgcaggtagcaaagggggtgttcctggagaattacatggattttgaactggacattgaatttgaaaggtgcacttacctaaccattccgaactgggctcggcaggatcttcgctctcttcgcctctggacagatttctgctctctcttcagctcaaacagcaacctcaagtttctggaagtgaaacaaagcttcctgagtgactcttctgtgcggattctttgtgaccacgtaacccgtagcacctgtcatctgcagaaagtggagattaaaaacgtcacccctgacaccgcgtaccgggacttctgtcttgctttcattgggaagaagaccctcacgcacctgaccctggcagggcacatcgagtgggaacgcacgatgatgctgatgctgtgtgacctgctcagaaatcataaatgcaacctgcagtacctgaggttgggaggtcactgtgccaccccggagcagtgggctgaattcttctatgtcctcaaagccaaccagtccctgaagcacctgcgtctctcagccaatgtgctcctggatgagggtgccatgttgctgtacaagaccatgacacgcccaaaacacttcctgcagatgttgtcgttggaaaactgtcgtcttacagaagccagttgcaaggaccttgctgctgtcttggttgtcagcaagaagctgacacacctgtgcttggccaagaaccccattggggatacaggggtgaagtttctgtgtgagggcttgagttaccctgattgtaaactgcagcctcacaaacctggacttgagtatcaaccagatagctcgtggattgtggattctctgtcaggcattagagaatccaaactgtaacctaaaacacctacggttgaagacctatgaaactaatttggaaatcaagaagctgttggaggaagtgaaagaaaagaatcccaagctgactattgattgcaatgcttccggggcaacggcacctccgtgctgtgactttttttgctgagcagcctgggatcgctctacgaattacacaggaagcgggattcgggtctctaagatgtcttatgaatgcaggtcagagggtcacatgttaacactagagtctgtcgagaggtaggatttgacactggttttctcactatttttgggagattctgcacgagtcacgcacccccttcacatgacgctatgtactttctcacagggataataaagttagagcactctc

SEQ ID NO: 344752 - DNA, 2943 bp, Artificial Sequence
  derived and/or modified sequence
atgacctcaccccagctagaatggaccctgcagactctcctggaacagcttaatgaagatgagctcaaatcgttcaaaagcctgctgtgggcttttccactagaggacgttttgcagaaaactccatggtctgaggttgaagaggcagatggcaagaaattggccgaaatcttggtaaacacaagctcagagaactggattcgaaacgccactgtcaacattcttgaagagatgaacctaaccgaactatgcaagatggccaaggctgaaatgatggaggatggacaggttcaagaaatcgataacccagaattgggagacgctgaggaggacagtgagctcgcgaagcctggcgaaaaagaagggtggcggaattctatggaaaaacagtccttggtgtggaagaacaccttttggcagggagacatcgacaattttcacgatgatgtgacactgaggaaccagagattcatcccttttctcaatcccaggactcctcgaaagcttaccccgtacacagtagtgttacacggcccagccggagtcggtaaaacaacacttgccaagaagtgtatgctggattggaccgactgcaacctcagcccaaccctacgttatgcattctacctgtcatgcaaggagctgagtcggatgggcccttgtagctttgctgaacttatctccaaagactggccagagctccaggacgatattccatctatactggcacaggcgcagcgcatattattcgtggtggacggattggacgagttgaaggtcccacccggtgcactaatccaggacatctgcggagattgggaaaaaaagaaacctgtgcccgtgctcttaggaagtctgctaaagcgtaagatgctacccagagcagccctgctagtgaccacaagaccccgagcactgagagacttacaactcttggctcaacagccgatctacgtgagggttgagggattcttggaggaggacaggcgggcttactttcttcggcacttcggtgacgaggatcaggcaatgagggccttcgagctcatgaggtcaaatgccgctcttttccagctcggctccgcccctgcagtttgttggatcgtgtgcaccactctcaaactgcaaatggagaagggtgaggatccagtgccgacttgcctcacaagaaccggcctctttctaagattcctttgcagcaggttcccccaaggggctcagttgaggggcgcactgaggaccctgagcctgcttgctgcacaagggctctgggcccaaatgtctgtgttccaccgcgaagacctggaacgtctgggagtccaggagtcagacctcaggctgttcctcgacggtgacattttacgtcaggaccgggtcagtaaggggtgttacagttttatccacctatcatttcagcagtttctcaccgccctgttttatgccctagagaaagaagaaggagaagatcgtgacggtcatgcctgggatatcggcgacgttcagaagctcctctccggcgaagaaagactgaagaaccccgatctcattcaggtggggcacttccttttcggactggcaaatgaaaagcgcgctaaggagctcgaggctactttcggctgccggatgtctccagatatcaagcaggagctgttgcagtgtaaggcccacctgcatgccaataagccacttagcgtgaccgacctgaaggaagtcctcgggtgtctttatgagagccaagaagaggagctggctaaagttgtcgttgcccctttcaaagagatctcaattcatcttaccaacactagtgaagtgatgcattgctcattctcccttaaacactgccaggacctgcagaagctctctctccaggtagccaagggagtcttcctggagaactatatggactttgaactggacatcgaatttgagcgatgcacttacctgaccatacccaactgggctcggcaggatctgcgctctttgcggctgtggaccgatttttgctcacttttttcctcaaactctaacctcaagtttctagaagtgaagcagtcctttttgtcagactccagtgtgcggatcctctgtgatcacgtaaccaggagtacatgccatttacagaaggtggagattaaaaacgttacccctgatacagcataccgcgacttctgcctcgcctttatcgggaaaaagacactcacccatctgacgctcgccggacatatcgagtgggagcgaaccatgatgctgatgctttgcgacctcctgcgcaaccataagtgtaatctgcaatatctgagactggggggacactgtgcgacccccgaacagtgggccgagttcttctacgtgctgaaagccaaccagtccctgaagcaccttaggctcagcgcgaacgtgctccttgacgagggcgcaatgctcttgtacaagactatgacgcgcccaaaacatttccttcagatgcttagcctggagaattgtagattgaccgaggcatcttgtaaggacctcgcagcagtgcttgtcgtctctaaaaaacttacacatctgtgcctggccaaaaaccccattggagataccggggtgaagttcctgtgcgaaggtctttcctaccccgattgtaagctgcaaaccctggttctgcaacagtgtagcattaccaagctgggatgtcgatacctgtctgaggccctccaggaggcctgttcccttaccaatctagacttatccatcaatcagatagctcggggtttgtggatcctgtgtcaggcgcttgagaatccaaactgcaacctgaaacatctgaggctgaagacctacgagacaaacctggagatcaagaagctcttggaggaggtgaaggagaaaaacccgaagctgacaatcgactgtaacgcaagcggcgctacagcccctccctgctgcgacttcttctgttag

SEQ ID NO: 344753 - DNA, 2943 bp, Artificial Sequence
  derived and/or modified sequence
atgacatcccctcagcttgaatggaccctccagaccctcctggagcagctcaatgaagacgagctgaagtctttcaaaagcctgctctgggcctttccactggaagacgtgctgcagaaaaccccgtggtccgaagtcgaggaagcagacggaaagaaactagcagaaatcttagtaaacactagctctgagaattggatcaggaatgcaacagtgaatatcctggaagaaatgaacctgactgaattgtgtaagatggcaaaggcggagatgatggaagatggacaggttcaggaaatcgataaccccgaactgggcgacgctgaggaagactctgagctggctaaacctggtgagaaagagggttggaggaactcaatggagaaacaaagcctggtgtggaagaacaccttctggcaaggagacatagacaactttcacgatgatgttacgctgcgcaaccagagattcattccgtttctgaatcctcggactccgagaaaacttactccatataccgtggtgctgcatggtccagccggagtgggaaagactaccctcgccaagaaatgtatgttggactggaccgactgtaacctgtctccgacactgcgatatgccttttacctatcatgtaaagagctctctcggatgggtccttgtagtttcgccgaactgatttctaaggactggccagaactgcaagatgatatcccatccatcctcgcacaggctcaacgcattctctttgtcgttgacggattagatgagttaaaggtaccaccaggcgcattgatccaggacatctgtggagactgggagaaaaagaagcccgtgccagttctcctggggagcctcctgaagagaaagatgctgccacgggcagctttgctagtgacaacccggcctcgggcactgcgcgaccttcagctgttggcgcagcagcccatatatgttcgagtggagggatttcttgaagaagaccggagagcctattttttaagacattttggtgacgaagatcaggctatgcgcgcttttgagctcatgagatccaatgccgctttgtttcagctggggagcgccccagcagtttgctggatcgtttgcacgacactaaagctgcaaatggagaaaggcgaggatcccgtccccacttgccttacccggactggcctgttccttaggttcctttgctcccgctttccacagggcgcacagctacgtggcgctttacgaaccctgtctctgttagcggcacaagggctgtgggctcagatgtctgtcttccaccgggaagacctcgagagactgggcgtgcaggagtcagacctcagactctttctggacggagatattttgcgccaagatcgcgtatctaaaggatgctacagttttattcacctttctttccagcagtttctgaccgccttattctacgccctggagaaggaagagggagaggaccgggacggtcacgcctgggacattggagatgtgcagaagctattgtcgggcgaagagaggctgaagaatcccgatctgatccaggttgggcacttccttttcggcctagccaatgaaaagcgcgcaaaggaattagaagcaacgttcggttgtagaatgtcacctgatattaagcaggagctccttcagtgcaaggcccacttacatgccaataagcccttgagcgtcactgacttgaaggaggtactaggctgtctgtatgaatcccaggaggaagagctggccaaggttgttgtcgccccttttaaggaaatttcaatacatctaacaaacacttctgaggtcatgcattgcagttttagtctgaagcactgtcaggatttacagaaactcagcttacaggtggccaagggggtgtttctggaaaattatatggatttcgagctcgatatcgagttcgaacggtgtacatacttgacaatcccaaactgggcgaggcaggacctgcggagcctgcgcctctggaccgacttctgctcactttttagctccaatagcaacctgaagttcctggaagtgaagcagtccttcctgtcagatagcagcgtgaggattctatgtgaccatgttacaagaagcacttgccacctccagaaggttgaaatcaagaacgttacaccggacacggcctaccgggatttctgccttgcctttataggaaagaagactcttacccatttgacactggcgggtcacatcgagtgggaaaggactatgatgctgatgctgtgtgacctgctccgaaatcacaagtgcaatctacaatacctgcgcctcggagggcactgtgcgacaccagaacaatgggctgaatttttctacgtgctaaaggctaaccagagcctgaagcacctgcgactcagtgccaacgttctcttggacgagggtgccatgctgctgtataagactatgactaggcctaaacattttctacaaatgctgagtctcgaaaactgccgcctgactgaagccagctgcaaagatctcgccgctgttctagtggtgtccaagaaactaacccacctgtgtctggccaaaaatcccataggtgatactggagtgaaattcctttgtgagggcctttcttaccctgactgtaagctgcaaacactggtactgcagcagtgttcaatcaccaaactgggatgccgctatttatctgaggctcttcaggaggcatgcagcttgaccaatttagacctgagtattaatcagatcgctagggggttgtggatcctgtgtcaagcattggaaaacccaaattgtaacttaaagcatttgaggttgaagacatatgagactaacttggagatcaagaaacttctcgaagaggtgaaggagaagaaccccaagcttacgatcgattgcaacgcatccggcgctacagcccctccctgctgtgacttcttttgctag

SEQ ID NO: 344754 - DNA, 2943 bp, Artificial Sequence
  derived and/or modified sequence
atgacctccccccagttagaatggacccttcagactcttctggagcagctcaacgaagatgaattgaagagcttcaaaagcctcttatgggctttcccacttgaggatgttcttcaaaagacaccatggtctgaggtcgaagaggccgatggaaaaaaactggctgagatcctcgtgaacacatcttccgagaactggattagaaacgccactgtgaacatcctggaagagatgaacctgactgaactctgtaagatggcaaaagcagaaatgatggaagacgggcaagtccaagaaatcgataaccccgaactgggggacgccgaagaagactccgagttggcaaaaccaggcgagaaggaaggatggaggaattctatggagaaacagtccctagtgtggaagaataccttctggcaaggcgatattgacaacttccatgacgatgtcacactgcgtaatcagcgcttcatcccgttcctgaatcctagaacacccaggaagttgactccctataccgtggtgctacacggcccagcgggtgtgggaaaaacaaccctggccaagaaatgtatgctggactggaccgattgcaacttgtccccaaccttacgctacgcattttatctcagctgcaaagagctgagtcggatgggtccctgttcattcgccgagctaatttccaaagactggcccgagctgcaagatgacatcccgtcaatcctggcacaggcccagcgcattctgttcgtggtagatgggctggacgagctgaaggtgccgcctggggctttgatccaggacatttgcggcgactgggaaaaaaagaaaccagtaccagtcctactggggtctctgttgaagagaaagatgctgcccagggccgctctgctcgtcaccactcggcctagggccctacgggacctgcagttgctggcacagcagccaatctatgtccgcgtggaggggttcctggaggaagaccgcagggcatacttcttgcggcatttcggtgacgaggatcaggcaatgcgcgcattcgaattgatgcgaagtaatgccgcactgttccagctgggtagtgcacccgcagtgtgctggatcgtctgtaccaccctgaaattgcagatggaaaagggagaagacccagtccccacttgccttacgcgaaccggattgtttttacgtttcctctgcagtagattccctcagggcgctcagctgagaggcgctctgcgcacactcagcctgctcgcagcgcaggggctgtgggctcagatgagtgtctttcatagggaagacttggagcgactcggggttcaggagtctgatctccggctgttcctggacggcgatatactgcggcaagatcgagtgtcaaaggggtgttactcatttatccacctgtcattccagcagtttttaacagctcttttctacgccctggagaaagaggagggcgaagatagggatggccacgcctgggatataggtgacgtgcagaaactgctgtccggggaggaaagactaaaaaatcctgatctaatccaggtgggccactttctgttcggcctagcgaatgagaagcgggctaaggaactggaggcgacgtttggctgccggatgagcccagacatcaaacaggagctcctacaatgcaaggcccacctccacgcgaataagcctctgtctgtcactgatctgaaagaggtgcttggatgcctttacgagagtcaagaggaagaactagccaaggttgtcgtcgcccctttcaaagaaatcagcatccatctgacaaataccagtgaggttatgcattgttctttctccttaaaacactgccaggacctgcagaaactgtctttgcaagtcgccaagggagtgtttctagagaattacatggatttcgagcttgatattgaatttgagagatgtacatacctcacaataccaaactgggccagacaggatttgaggtctcttcgtctttggactgacttctgttcattgttctcttccaactcgaaccttaaattcctggaggttaaacagagcttcctcagcgatagcagcgttagaatcctctgtgaccatgttaccaggagcacatgccacctacagaaagttgagatcaaaaacgtgacacccgacacggcttaccgcgacttttgcctggcctttataggtaagaagactcttacccatctgacgttggccggtcatattgagtgggagaggacgatgatgctcatgctctgcgatctcctgcggaatcacaagtgtaatctgcagtatttgcgtctcggtgggcattgcgcaactcccgagcaatgggcagagtttttctatgtgctgaaagcaaatcagtccctgaagcatctacggttgtcggccaacgtgttgctcgacgaaggagctatgctgctctataagacaatgactagacccaagcactttttgcagatgctatctctagaaaactgccgcttgacagaggcctcctgtaaagatctggcagcagtccttgtcgttagtaaaaagctaacgcacctgtgtctggcaaagaacccaatcggagatacaggagttaagttcctttgtgaagggttgtcttatccagactgtaagctgcagactctggttctacaacagtgctccatcactaaactggggtgcagatacctctcggaagcccttcaggaggcttgctcactaaccaacctcgatcttagcattaatcagatcgcaagaggcctgtggatcctttgtcaggcactcgaaaatcctaattgtaaccttaagcatctgcggttaaagacatatgagacaaatctggagattaagaagttgcttgaggaagtgaaagagaagaatccaaaacttacaattgactgtaatgccagcggagctacagcgcctccatgttgtgatttcttctgttag

SEQ ID NO: 344755 - DNA, 2943 bp, Artificial Sequence
  derived and/or modified sequence
atgacctccccacagttggagtggacacttcagactctcctagaacagttaaacgaagatgagctcaaatccttcaagagtctgctatgggcatttccactcgaggatgtgctccagaaaacaccttggagcgaagtcgaggaggccgatggcaagaaactggctgagatcctggttaatacttcctcagagaattggatacgcaatgccactgttaatatcctggaagagatgaacctgactgaactgtgtaagatggctaaagcagagatgatggaagacgggcaagtacaggagatcgacaaccctgagctgggtgacgctgaggaagacagcgaactggcgaaaccgggtgagaaagagggatggaggaattctatggagaaacaatccttggtgtggaagaacactttttggcagggagacatcgacaactttcacgacgatgttaccctgcggaaccagcgctttatacccttcttgaaccccaggaccccgaggaagttgacaccgtataccgttgttctccacggcccagccggagttggcaagaccaccttagccaagaagtgtatgctcgactggaccgattgtaacctgtcccccactctgcggtacgctttctacttgtcctgtaaagaactatcacggatgggaccctgttcttttgctgagctgatttctaaggactggcccgaattgcaggatgacatcccatccatcctcgcccaggcgcagaggatcctcttcgtcgtagacggattggacgagctgaaggtgcctccaggagccctcatccaagatatttgtggggattgggaaaagaagaagccagtgccagtgttactcggctctctgcttaagcggaaaatgctccctagggccgctctcctggtgacgacgcggccaagggctcttagagatctgcagctcctcgcccagcagcctatttacgttcgggttgagggtttcctcgaggaagaccgtcgggcatacttcctgaggcactttggcgacgaagatcaggcgatgagagcctttgagctgatgaggagcaatgcagcccttttccaactgggcagtgccccagccgtctgctggattgtgtgtaccaccctgaagcttcagatggaaaagggggaagacccggtgcctacctgcctgactcgaactgggctgtttctgaggtttttgtgttcccgcttcccacaaggtgcccagttgagaggtgccctacgaacgttatctctgctcgccgcacaggggttgtgggcccagatgagtgttttccatcgggaagatctggagcgcctaggcgtgcaggagtcggacctccgcctgtttttggacggcgatattctgagacaagatagggtgagtaaggggtgttatagttttatccacttgtcattccagcagttcctgaccgctcttttttacgcacttgaaaaggaggaaggtgaagaccgcgacggccacgcctgggatattggggatgtccagaaactcttaagcggggaggaacgcctgaaaaatcccgacctgatccaggtcggacacttcttattcggtctggctaatgagaagagggcaaaagagctcgaggccacattcgggtgccggatgagtccggatatcaaacaggagctgctccagtgcaaggctcacctacatgctaataagccactttccgtgacagacctgaaggaagtgttaggctgcctttatgaatcccaagaagaggagcttgctaaagttgttgttgcacctttcaaagagataagtattcacctcactaacacttctgaggtcatgcactgtagttttagtctcaagcattgccaggatcttcagaaacttagtctgcaggtggccaagggagtcttcttagaaaattacatggattttgaactcgacattgagtttgagcgctgcacctatttgactatacccaactgggctaggcaggatctacgtagtctacgcctttggaccgacttctgttccttgttcagctctaattctaacttgaaatttctcgaggtgaagcagtcctttttgtcggatagtagcgttaggattctatgcgaccatgttaccagatccacatgtcatctgcaaaaggtcgagattaaaaatgtcacccccgacaccgcgtacagagacttttgtctcgcttttatcggaaaaaagacactgactcatctgaccctggctggccacatcgagtgggaacgcacaatgatgctcatgctgtgtgatctgctgaggaatcacaaatgtaacttacagtatttacggctgggcggacactgtgccaccccagagcagtgggccgagttcttctacgtcctgaaggctaaccagtccctcaagcacctgaggctcagcgccaatgtccttttagatgaaggcgcaatgcttctctataagacaatgaccagaccaaagcattttttgcagatgcttagcctggaaaactgcaggctcactgaggcgtcatgcaaagatctggcagccgtgctggtggttagcaaaaagctgacccatctttgccttgctaaaaacccaattggagacacaggcgtgaaatttctgtgcgagggattatcctaccctgactgtaagttacagacgctcgtgctgcaacagtgcagcatcacgaagcttggttgtagatacttgtccgaagccctgcaagaagcctgttcactgaccaacttggatttgagtatcaaccaaatcgccagagggttgtggattttgtgccaggctctggagaatcctaattgtaacttgaagcacttgcgacttaaaacgtacgagactaacctggagataaaaaaactgctggaggaagttaaggaaaagaatcccaagctcacaatagactgcaatgcatctggggcaacagccccaccttgttgcgactttttctgctag

SEQ ID NO: 344756 - DNA, 2943 bp, Artificial Sequence
  derived and/or modified sequence
atgacatctcctcaattggagtggactctgcagacacttctggagcagctgaacgaagacgaactgaagtctttcaagtccttgttatgggcttttccacttgaagacgtgttacagaagacgccatggtcagaagtggaggaggccgatggtaagaaactcgcggaaattctggttaatactagctcagagaactggattcggaatgccaccgtgaatatcctggaggagatgaatctcaccgaactgtgcaagatggctaaggctgaaatgatggaggacgggcaggtccaagagattgacaaccccgaactgggggatgccgaggaggattccgaactggccaaacctggagaaaaagaaggctggcgcaatagcatggagaagcagtctctcgtctggaaaaacacattctggcaaggcgatattgacaattttcacgatgacgtcaccctcaggaatcagcgctttatacctttcctcaacccaagaacacctcggaagctaaccccatatacagtggttcttcatggcccagcaggcgtgggcaaaacaactcttgcgaaaaagtgtatgctggattggaccgactgcaacttgtcacccacgttaaggtacgccttttatctttcatgcaaggagttgtcacgcatgggaccttgttcgttcgccgaactcatctctaaagattggccagagttacaggatgacataccttcaatcctggcacaggctcagcggattctctttgtagtggacggcctggacgagctgaaggtcccgcctggcgctttgattcaagatatctgtggagattgggagaagaaaaaacctgtcccagtcttgctcgggagcttactcaaacggaagatgctcccaagggccgctttactggttacgactcgtcctagggctctgcgagacttgcagctgctcgcccaacagccaatctacgttagggttgaaggtttcctggaggaagatcgacgcgcatattttctccgccactttggtgatgaggatcaggctatgagggctttcgagctcatgagaagcaacgccgcactcttccagttgggaagcgctccggcagtgtgctggattgtgtgcaccaccctgaagctgcagatggaaaaaggggaagaccccgttcctacatgcctgacacgaacaggcctcttcttgcgcttcctctgttcacggttccctcagggcgctcagctgcgaggcgcactgcgcaccttatcgctactggccgcacagggtctctgggcacagatgtccgtcttccaccgtgaggacctggagcgactgggcgtgcaggaaagtgatctcagattattcctggacggcgatatcctgagacaggatagggtctccaaaggttgctatagtttcatacatttgtccttccaacagttcctaaccgctttgttctacgcgctggagaaagaggaaggtgaggatagggatggacacgcctgggacatcggggacgttcagaagctactgtcgggcgaggagcggctcaagaaccctgatcttatccaagtgggtcacttcctatttggcctcgccaacgaaaaacgagcaaaagaattggaagccaccttcggctgtcggatgagccctgacatcaagcaggaactcctgcagtgtaaggcccacctgcatgcgaataagccccttagtgtaacagatctcaaggaggtgctcggctgcctttatgagtcccaagaagaggagcttgcgaaagtggtggtggctccttttaaggaaatctcaatacacttaacgaatacctccgaagttatgcactgcagcttctctcttaaacattgccaggaccttcagaaattgagtctacaagtagccaagggagtcttcctcgagaactatatggatttcgaactggatattgagttcgagcggtgtacctacttgacaatcccaaactgggccaggcaggacttgcgctctctgcgtttgtggacagatttttgttccctgttctcatctaattctaacctaaaattcctggaggtgaaacagtcctttttaagtgattcaagcgtgcggatcctgtgcgaccacgtgacacgatctacgtgccacttgcagaaggtagaaatcaaaaacgtcacgcctgacaccgcctatagggacttctgtcttgcttttatcggtaagaagaccctgacacacctgactcttgccggtcatatcgagtgggagagaacaatgatgctgatgctctgtgacttactccggaatcacaagtgtaatcttcagtatttaagattgggcggacattgcgcaactccagagcaatgggcagagttcttctatgttctcaaagccaaccagtctctgaaacatctgcggcttagcgctaacgttctgcttgatgaaggcgcaatgctgttatataaaacaatgacgagaccgaagcactttctccaaatgctgtctctcgaaaactgtagactgaccgaggcgtcgtgtaaagatttagccgcagtcctggtggtgagtaagaaactgactcacttgtgtctggctaagaaccctatcggagacaccggcgtgaagtttctctgtgagggcctgtcatatcccgactgtaagctccaaaccctggtcctgcagcaatgcagcatcaccaagctggggtgtcgatacttatccgaagccctccaagaagcatgctctctcaccaacctagatcttagcattaatcaaatcgccagaggtctgtggatcctctgccaagcgctggagaacccaaactgtaacctgaaacacctgaggctgaagacgtatgaaacaaacctggaaattaagaagctattagaggaggtcaaggagaagaaccccaaactaaccatcgactgtaatgcttcaggcgcaactgccccaccatgttgcgattttttctgttag

SEQ ID NO: 344757 - DNA, 2943 bp, Artificial Sequence
  derived and/or modified sequence
atgacttcaccgcagttggaatggacactgcagaccctactcgagcagttgaacgaggatgagcttaagtcctttaaatcattgctttgggcctttccactggaggatgtgcttcagaaaaccccatggtctgaggtcgaagaggccgatggaaagaagcttgcagagatactagtgaacaccagttcagagaactggatcagaaacgccactgtcaatattctggaggaaatgaatctcaccgagctgtgcaagatggctaaggctgagatgatggaagatggtcaggtccaggagatagataatcctgaactcggggatgcagaggaggactccgagctggccaagccaggagaaaaagaagggtggcgcaatagcatggaaaagcagagcctcgtgtggaaaaacactttttggcagggggacatagacaattttcacgatgatgtgacactcagaaatcagcggttcataccctttctaaacccacgtacccctcgcaagcttactccgtatacagtggtcctgcacggcccagccggtgtgggaaaaacaacacttgctaaaaaatgcatgctggactggacagactgcaatcttagccccaccctgagatatgccttctacctcagctgcaaagagctttcaagaatgggaccatgctcattcgccgagctgatatcaaaagattggccagagttgcaagatgatatcccctccatcctagcgcaagcgcagcgcatcctattcgtggttgacgggctggatgaactgaaggtacccccaggggcactgatccaggatatttgcggtgattgggagaagaagaaaccagtacccgtgctgctgggttccctgctgaagcggaaaatgctgcccagagccgctcttctggtaaccactcgtccacgagcactgcgcgacttacagttacttgcgcagcaaccgatatacgtccgcgtggagggattcttggaagaagataggagagcctactttctcagacactttggagacgaggatcaggctatgagggccttcgagctgatgcggtccaacgcagcactgttccagctggggtctgcccctgctgtgtgctggatcgtctgcaccacccttaagttgcaaatggagaaaggcgaagaccctgtacccacctgtctgacaaggacagggttgtttctcaggtttctctgcagtagattcccccagggagctcagttgcgcggagctttgcggaccttatcccttctggcggctcaaggactctgggcccagatgtcagttttccaccgggaggatctggagcgcctgggcgtacaggagtcggacttaaggttgtttcttgacggtgacatcctccgccaggaccgggtgtcgaagggttgttatagctttatccacctcagttttcagcagttcctcacagctctgttttacgcactggaaaaggaggaaggagaagatcgggatggccatgcttgggacatcggagacgtccaaaagctcttgtccggcgaggagcgactgaagaatcctgatctgattcaggttgggcacttcctgtttggcctcgctaacgaaaagcgggctaaagagctcgaggctacgttcggctgccgaatgtcccctgacatcaagcaagagcttctccaatgcaaggcacaccttcacgccaataagcctctgagcgtcaccgatcttaaagaggttctcggctgtctgtacgaatcacaagaagaggagcttgctaaagtggtggtggctcccttcaaggagatatccatacatctgacaaatacttcagaggtcatgcactgtagcttctcactgaagcattgtcaggacctgcagaaactgagcctgcaagtggccaaaggcgtgttccttgagaactacatggattttgagctggatattgagttcgaacggtgtacttaccttaccattcccaactgggctcggcaggacctccgcagtctcagactgtggacggatttctgctcactcttctcttcgaattccaatctgaagtttctggaggtaaaacagagctttctttccgattcttctgtccgaatcctctgcgaccatgttacacggtctacctgtcatctccagaaggtggagattaagaatgtcactccagatacagcgtacagggacttctgtttagctttcattgggaaaaaaacactcacgcatcttactttagctggccacattgaatgggagaggactatgatgctcatgctgtgtgatctacttcggaatcataagtgtaaccttcagtacctgcgcctggggggacactgtgctacacccgagcagtgggcggaatttttctatgttcttaaggccaatcagtctttgaaacatctgcgtctgtcagccaacgtgttactggacgagggcgctatgctgctctacaagactatgactagaccgaaacactttctgcaaatgctctctctggagaattgcagactgactgaagcatcctgcaaggatctcgctgccgttcttgtcgtgagcaaaaaacttacgcacctttgtttggccaagaatccgataggggacaccggcgtcaagtttttgtgcgaggggttatcctatccggattgcaaactgcaaacactcgttctgcagcaatgttccattacaaaacttgggtgcaggtacttatccgaggctctccaggaggcgtgctcactaaccaacttggatctatctatcaaccagatcgcccgaggcctttggatactgtgccaggctttagagaacccgaattgtaatctaaagcatctgcgcctgaaaacctacgagaccaatcttgagattaagaaactgctggaggaggtgaaggagaagaatcctaaacttactatcgattgcaacgcttcaggggctaccgctcccccttgctgcgattttttttgctag

SEQ ID NO: 344758 - DNA, 2943 bp, Artificial Sequence
  derived and/or modified sequence
atgacctccccgcagcttgaatggacattgcagaccctgctcgaacagcttaacgaagatgaacttaagtctttcaagtccttgttgtgggcattccctctggaggatgtcttacagaaaacaccatggagtgaggtggaggaggcagatggaaaaaaactggcggagatcctggtgaacaccagctctgagaactggatccgaaacgcaaccgtcaatattctggaagaaatgaacttgacggaactgtgcaaaatggccaaggcagagatgatggaggatggacaagtgcaggaaatcgacaaccctgaacttggggatgcagaggaagattctgagctggccaaaccaggagaaaaggaggggtggcggaacagcatggaaaagcagtccctggtctggaagaatacgttttggcaaggagacattgacaacttccatgacgacgtgacactccggaatcagcggtttatccctttcctcaacccaagaacacctcggaagctcacgccatacaccgtggtgcttcatggccctgctggcgtaggtaaaaccaccttagccaagaaatgtatgctggactggaccgattgcaacctgtctcccactctgcgctatgctttctacttgtcctgtaaggaacttagtaggatgggcccttgttcctttgcagaacttatcagcaaggactggccagaactgcaggatgatattccctcgatcctggcacaggcccaacggatcctctttgttgtcgatggcctcgacgaactaaaggtgccccctggagccctgattcaggatatctgtggggattgggagaaaaaaaagcctgttccagtgctgctgggctccctattgaagcgcaagatgctccctagggccgctttgctggttactacgagaccgagagcacttagagacttgcagctcttggcccagcaaccaatctacgtgcgggtggaagggtttctggaagaggaccgcagagcctacttcttacggcatttcggggatgaggaccaggcaatgcgggcattcgagctgatgaggtccaatgctgctctgttccagctgggctctgctcctgcggtatgttggatcgtttgtacgacgcttaagctgcagatggagaagggcgaagatcccgtccctacctgcctgacccggacggggttgttcctaaggtttctgtgctcaaggttccctcaaggtgcccagctgcggggagctctgcggacactctctctgctggcggcacagggcctctgggctcagatgagtgtatttcacagggaagatcttgaacggctaggagtgcaagaatctgacctgagactctttctggatggagatatcctgcgacaagacagggtgtcgaaggggtgctattccttcatacatctatctttccagcagtttcttacagctctcttctacgccctagaaaaggaagaaggagaagaccgggacggacatgcctgggacatcggcgatgtgcaaaaacttctcagcggggaagaaaggctaaaaaatccggacctgatccaggtcggccattttttgtttgggctggcaaacgagaagagagctaaggaactggaagctacttttgggtgccgcatgtccccagacatcaagcaagaactcttacagtgcaaggcgcacctccatgcgaacaagcctttgtccgtgacggatttgaaagaagtccttggctgtctgtatgagtctcaggaagaagagctagccaaagtggtggtcgctccatttaaagaaatttctatccacctgaccaacacttccgaagttatgcattgttccttttctctgaagcactgccaggatctgcaaaagctgtctctccaggtcgctaagggcgtctttctggagaattatatggattttgaactcgacatcgaattcgagagatgtacttacttaacaatcccaaactgggcgcgtcaggacctcagaagccttcgactttggacagatttctgttcattgttttcgtccaattctaacttaaaatttctagaggtcaagcagtcttttctgtcagactccagcgtgagaatcctttgtgaccacgttacgagaagcacatgccacctgcagaaagtcgagatcaaaaatgtaacaccggataccgcataccgggatttttgccttgcctttatcggtaagaagaccttgactcacctgaccttggccggtcacatcgaatgggaaagaaccatgatgctgatgctatgtgacttactgagaaatcataagtgtaacctgcagtacctgaggcttggaggacattgcgccacccctgagcaatgggccgaatttttttatgttctcaaggctaaccaatcactgaaacatctgaggctgtctgcgaacgtgctgctggacgaaggcgcaatgctgctgtataagacgatgacccgcccaaaacactttttacagatgctgtctttggagaattgcaggctgaccgaggcctcttgtaaggatctggcagctgtgctggtcgtctcaaagaaactgactcatctgtgcttggcgaaaaaccccatcggagacacaggcgtcaagttcctgtgcgaaggtctgtcttaccccgactgcaagcttcaaacactggtgcttcagcaatgctcaataaccaagcttggatgtaggtacctgtctgaagcgctccaggaggcatgctccttgacaaacctggacctatcaatcaaccagatcgcaagaggtttatggatcctctgccaggcattggaaaaccccaactgcaatctgaagcacctgaggctgaagacctatgaaacaaatttggaaataaaaaagttgctggaggaggttaaagagaaaaacccgaagttgacaattgactgtaatgcttcaggcgctacagctccaccttgctgtgatttcttctgctag

SEQ ID NO: 344759 - DNA, 2019 bp, Artificial Sequence
  derived and/or modified sequence
atgactagcccccagctagaatggacactccagaccctactcgagcagttgaacgaagacgaactgaagtcattcaaatcattactgtgggcttttcctctcgaagatgtgctgcagaaaaccccatggtctgaggttgaagaggccgatggcaagaagctcgcagagatcctggtaaatacctcgagcgaaaactggattcgaaacgcaaccgtaaacattctggaagagatgaatctcaccgagctctgtaaaatggccaaggccgagatgatggaggaggaccgaagagcttactttctaagacacttcggtgatgaggaccaggccatgcgtgctttcgaactgatgcgaagcaacgcggctttattccaactaggtagcgcacctgcagtatgttggatcgtgtgtacgactcttaagttgcaaatggagaaaggagaagacccagtgcccacatgcctaaccaggacgggactgttcttgaggtttctgtgttctaggttcccacagggtgcccagctacgtggcgctctgagaacactgtctttgcttgcggctcaagggctgtgggcccaaatgtctgtcttccatcgagaggacctggaaagactcggggtgcaggaatcagacctgcggctgttcctggacggagacattcttcgccaggaccgggtcagcaagggctgctactcctttatccacctgtcattccagcagttcctcaccgcactgttttacgccctcgaaaaggaggagggagaggaccgggacgggcatgcctgggacataggcgacgttcagaagcttctgtccggagaggaacgcctgaaaaaccccgatctgattcaagtcgggcacttccttttcggtctagcaaacgagaagagagccaaggaattagaggctacattcggctgtcgcatgtcccctgatatcaaacaggagttgctgcaatgcaaagcccacctccatgcaaacaagcccttaagcgtgaccgatctcaaggaagtccttggatgcctatacgagtctcaggaggaggagctagcaaaagtagtggtagcaccattcaaggagattagcatccatctaactaacacctccgaggtgatgcattgttccttttccctgaaacattgtcaagacctccaaaagctctcactgcaggtggccaagggagtttttctggaaaactacatggactttgagctcgatattgagttcgagcgctgtacttatctcaccatccccaattgggcccgtcaagacttaagatctctaagactgtggaccgacttttgcagcctcttcagctctaattcgaatttgaaattcctggaggtaaagcagagcttcctgtccgactcaagcgtgcggattctctgtgatcacgtgacaagatctacctgtcatttacagaaagtggaaatcaagaacgtcaccccggataccgcgtacagggacttctgcctggcctttatcggcaaaaagacactcactcacttgaccttagctggtcatattgagtgggaacgaaccatgatgctgatgttgtgcgatctgttgcggaaccacaagtgtaacctccagtacctgaggctcggaggccattgtgctacccctgaacagtgggctgaatttttctacgtgctaaaggccaaccagtcccttaaacatcttcgtctaagtgcaaacgttttgttggatgaaggggcaatgttattgtacaagacgatgacccgacccaagcattttttacagatgttgagtctcgagaactgtagactgacggaggcctcctgcaaagatctggccgctgtcttggtggtctccaaaaagcttactcacctgtgtttagctaaaaacccaatcggtgatactggcgttaagttcctgtgtgaaggcctttcgtatccagactgtaaactgcagccacataagccgggacttgagtatcagccagactcctcttggattgtggactctctatccgggatccgtgagagtaaactgtag

SEQ ID NO: 344760 - protein, 143 aa, Artificial Sequence
  derived and/or modified sequence
MTAEFLSLLCLGLCLGYEDEKKNEKPPKPSLHAWPSSVVEAESNVTLKCQAHSQNVTFVLRKVNDSGYKQEQSSAENEAEFPFTDLKPKDAGRYFCAYKTTASHEWSESSEHLQLVVTDKHDELEAPSMKTVAHVCNTRTLGR

SEQ ID NO: 344761 - DNA, 538 bp, Artificial Sequence
  derived and/or modified sequence
gggaccggggccatgtctccacacctcactgctctcctgggcctagtgctctgcctggcccagaccatccacacgcaggagggggcccttcccagaccctccatctcggctgagccaggcactgtgatctccccggggagccatgtgactttcatgtgccggggcccggttggggttcaaacattccgcctggagagggaggatagagccaagtacaaagatagttataatgtgtttcgacttggtccatctgagtcagaggccagattccacattgactcagtaagtgaaggaaatgccgggctttatcgctgcctctattataagccccctggatggtctgagcacagtgacttcctggagctgctggtgaaagggactgtgccaggcactgaagcctccggatttgatgcaccatgaatgaggagaaatggcctcccgtcttgtgaacttcaatggggagaaataattagaatgagcaatagaaatgcacagatgcctatacatacatatacaaataaaaagatacgattcgcaa

SEQ ID NO: 344762 - protein, 288 aa, Artificial Sequence
  derived and/or modified sequence
  misc_feature (1)..(1): Xaa can be any naturally occurring amino acid
XKEPSAAAPTGAGGVAPGSGNNSGGPSLLVPLPVNPPSSPTPSFSDAKAAGALLNGPPQFSTAPEIKAPEPLSSLKSMAERAAISSGIEDPVPTLHLTERDIILSSTSAPPASAQPPLQLSEVNIPLSLGVCPLGPVPLTKEQLYQQAMEEAAWHHMPHPSDSERIRQYLPRNPCPTPPYHHQMPPPHSDTVEFYQRLSTETLFFIFYYLEGTKAQYLAAKALKKQSWRFHTKYMMWFQRHEEPKTITDEFEQLAQSLSLTKYSSLWLSAQPGTPPSHPPLGQLLGLL

SEQ ID NO: 344763 - DNA, 867 bp, Artificial Sequence
  derived and/or modified sequence
tgaaaagaaccctcagctgctgccccaacaggagctgggggcgtcgcccctggctccgggaacaatagcggaggccctagcctgctggtcccgctccccgtgaatccaccgtcttcgccaaccccaagcttcagtgacgctaaagctgcaggcgcccttctgaatggtcctccgcagttctccaccgcccccgagatcaaggcacccgaaccactgagtagcctgaaatctatggccgagcgggccgctatctcctcaggtattgaggatcccgtgccgacccttcatctgaccgaaagagatattattctttcaagcacgagcgcgccgccggcaagtgcccagcctccactgcagctgagcgaagtaaacatccctttgagcttaggagtctgtcccctcggacccgtacccctcactaaggaacagctttaccagcaggctatggaagaggcagcctggcatcacatgccgcatccgagtgattccgagaggattcggcagtatctgcctagaaacccttgtcccactccaccataccaccaccagatgccccccccacactccgacaccgtggaattctatcagaggctgtcgacggagaccctatttttcatcttttactaccttgagggcaccaaagctcagtacctcgcagctaaggcactgaaaaaacaatcttggagatttcataccaagtacatgatgtggttccagcggcatgaggagcccaaaacaataaccgacgagttcgagcaactggctcaaagtttgagcctgactaagtactcaagcctgtggctctcagctcagccagggactcccccctcacaccccccgctcggccagctgctgggtttgctatag

SEQ ID NO: 344764 - DNA, 867 bp, Artificial Sequence
  derived and/or modified sequence
tgaaaggagcccagcgctgctgcccccaccggggccggcggcgtggcccctggcagcggcaacaacagcggcggccccagcctgctggtgcccctgcctgtgaacccccccagcagccccacccccagcttcagtgatgccaaggccgccggggccctgctgaatggaccaccccagttcagcacagcccctgagatcaaggcccctgagcccctgagcagcctgaagtccatggccgagcgggccgccatcagcagcggcattgaagatcctgtgcccaccctgcacctgacagagcgggacatcatcctgagcagcaccagcgcccccccagccagcgcccagccccccctgcagctgtctgaggtgaacatccccctgagcctgggcgtgtgccccctgggccctgtgcccctgaccaaggagcagctgtaccagcaggccatggaggaggccgcctggcaccacatgccccaccccagcgacagcgagcgcatccggcagtacctgcccaggaacccctgccccaccccaccctaccaccaccagatgcccccaccccacagcgacacagtggagttctaccagaggctgagcacagagaccctcttcttcatcttctactacctggagggcaccaaggcccagtacctggccgccaaggccctgaagaagcagagctggaggttccacaccaagtacatgatgtggttccagagacatgaggagcccaagaccatcacagatgaatttgagcagctggcccagagcctgagcctgaccaagtacagcagcctgtggctgagcgcccagcccggcaccccacccagccacccccccctgggccagctgctgggcctgctgtag

SEQ ID NO: 344765 - DNA, 867 bp, Artificial Sequence
  derived and/or modified sequence
tgaaaggagcccagcgccgccgcccccaccggcgccggcggcgtggcccctggaagcggcaacaacagcggggggccgtcactcctcgtacccctgcctgttaacccaccgtcaagtcctactccctcgttctcagatgccaaagccgctggagctctccttaacggccctccacagtttagtactgctcctgagataaaagcacctgagcccctctcttctcttaaatccatggcagagagggccgcaattagttccggcatcgaagatcctgtgcctactctgcatctgaccgaacgagacataatcctctcaagtactagcgctccgcccgcctcagcccagcctccgttacaactgtcggaagtgaatattcctctgtctttgggagtgtgtcccctaggcccggtccctcttacaaaggagcagctgtatcagcaggcaatggaagaggccgcgtggcatcatatgccccatccgtcagactctgaacgaattcgacagtacctccccagaaatccttgtccaacccctccttatcaccaccagatgcccccaccccatagcgacacagtcgagttttatcagaggctcagtaccgagacactgtttttcattttctattacctggaggggactaaggcccaatacctggccgccaaggcccttaagaagcagagttggaggtttcacaccaaatacatgatgtggtttcagcgtcacgaagagcccaagacgatcacagacgaatttgagcagctggcccagagtctatcgctgacgaagtatagctctctctggctgtccgcgcagcctggtactccaccatcacatccccccttaggccagctgttgggcttactgtag

SEQ ID NO: 344766 - DNA, 867 bp, Artificial Sequence
  derived and/or modified sequence
tgaaaggaaccctccgctgccgcaccaacgggagctgggggtgttgccccaggttctggaaacaatagtgggggaccttcacttctggtccccctgccagttaacccaccttcctctcctaccccaagtttcagtgatgcgaaggcagcaggagccctcttgaatggtcctccacagttttcgaccgccccagagattaaggcccctgaacccctgagttcactgaaatcaatggcagagagagcggcaatttcctcaggcattgaggacccagtgcctacccttcacctcacagagagggacatcatcctgtccagtactagtgcacctccagccagcgcccagccaccgttgcaattgtccgaagtgaatattccactgagccttggtgtttgtcccctggggcctgttcctttaacaaaggagcaattgtatcagcaggccatggaagaagcagcttggcaccacatgccgcatccatctgactcagaacggatccgacaatatctgccccgaaacccatgtccgacacctccttatcaccaccagatgcctcctccacactctgatacagtcgagttctatcagaggctttctaccgagactctgttttttatcttctactatctggaaggcacgaaagcccagtaccttgcagcaaaggcacttaaaaagcagtcatggagatttcatacgaaatacatgatgtggttccagagacacgaagagccaaagaccattacagatgagtttgagcagctggcccagagtcttagtctcactaagtattcctccctctggctttcagcccagcctggaacccccccttcacatccaccgctgggacagctgctaggcctgctgtag

SEQ ID NO: 344767 - DNA, 1269 bp, Artificial Sequence
  derived and/or modified sequence
gaaggaacccagtgcggcagccccaacgggggctgggggcgtggccccaggctcagggaacaactcagggggacccagcctcctggtgccactgcctgtgaatcctcccagctccccaacgcccagcttcagtgatgccaaggcagccggtgccctgctcaatgggcctccacagttcagcaccgccccagaaatcaaggcccctgagcctctgagctccttgaagtccatggcggaacgggcagccatcagctctggcattgaggaccctgtgccaacgctgcacctgaccgagcgagacatcatcctgagcagtacatcagcacctccggcctcagcccagccgcccctgcagctgtcagaggtgaacataccgctgtcgctgggtgtctgtccactgggccctgtgcccctcaccaaggagcagctctatcagcaggccatggaagaggccgcctggcaccacatgcctcacccctctgactctgagcgtattcggcagtacctcccccggaacccctgtccgacgcccccctaccaccaccagatgccacccccacactcggacactgtggaattctaccagcgcctgtcgaccgagacactcttcttcatcttctactatctggagggcactaaggcacagtatctggcagccaaggccctaaagaagcagtcatggcgattccacaccaagtacatgatgtggttccagaggcacgaggagcccaagaccatcactgacgagtttgagcagctggcgcagtccctcagcctgaccaagtactcctccctctggctgtctgctcagcctggaacaccgccctctcatcctccacttggccagctcctaggcctcctgtaggtctcagcccaaatgtcccttcctcaaagaaaccttcctggagccacccagcccagtgcctcccctttgcagtgctgggcacactcgcttggggtgtgggattttcccagtatgtgtccctgcaccaggctgtgggctctgctgccgagggaccttgatggcccccacttcacctccaggtcccagcactcagcagggcaggggctcagtgccgaaactattttttttgaatgggcttctcaagttctaatactgggaaattcctgctgcttgcaaacactctggaaccaacctacctgggtttcagcccagtccagctgggcgactctaggcaagtcactcgaacctctgtgtctcaattaacttatctgtaaaaatggggggaagaccacctacctaatgca

SEQ ID NO: 344768 - DNA, 867 bp, Artificial Sequence
  derived and/or modified sequence
tgaaaggagcccagcgccgccgcccccaccggcgccggcggcgtggcccccggcagcggcaacaacagcggcggccccagcctgctggtgcccctgcccgtgaacccccccagcagccccacccccagcttcagcgacgccaaggccgccggcgccctgctgaacggccccccccagttcagcaccgcccccgagatcaaggcccccgagcccctgagcagcctgaagagcatggccgagagagccgccatcagcagcggcatcgaggaccccgtgcccaccctgcacctgaccgagagagacatcatcctgagcagcaccagcgccccccccgccagcgcccagccccccctgcagctgagcgaggtgaacatccccctgagcctgggcgtgtgccccctgggccccgtgcccctgaccaaggagcagctgtaccagcaggccatggaggaggccgcctggcaccacatgccccaccccagcgacagcgagagaatcagacagtacctgcccagaaacccctgccccacccccccctaccaccaccagatgccccccccccacagcgacaccgtggagttctaccagagactgagcaccgagaccctgttcttcatcttctactacctggagggcaccaaggcccagtacctggccgccaaggccctgaagaagcagagctggagattccacaccaagtacatgatgtggttccagagacacgaggagcccaagaccatcaccgacgagttcgagcagctggcccagagcctgagcctgaccaagtacagcagcctgtggctgagcgcccagcccggcaccccccccagccacccccccctgggccagctgctgggcctgctgtag

SEQ ID NO: 344769 - DNA, 546 bp, Artificial Sequence
  derived and/or modified sequence
gacctggaaagatgttcttcacataatgggaaaaaaacaaaaacagcttttaaatatgaccatatgcttccattgtatgaaaaatatcacaatagtttccatcatcctaagaatggttacctgtggtgagatcatagataatagttcttatttagcttgtagacctaggcttccactgttccattttactatattctgtttccctgagagtgctgtttcagttatatagcaagcgtacctctggccttagatgatcgtgaattccaagttcctagcaagagagaaagagatttcatgtgcaatgtgaatataccagttgaagtacatttctcccgaagtccacagatcctggtccctacaaataagcctgctcatgtgagataagaaaggagttcctggaaccaggaattcattctcagtgtagaagacctagctgagacctcactccacagttttggggcagaagcagaagagacgcacagtagaaccgatctcagccttgctgatcatctcgtacagcagcagaaaatgaccatgttacaggtg

SEQ ID NO: 344770 - DNA, 1716 bp, Artificial Sequence
  derived and/or modified sequence
atgctcgaaactattctccggatgctcgacaacgattctatcctggtggacgctattcggaagattaaggacgatgtggaatactacgtggacagctcccaggatcccgactttgaagagaacgagttcctgtacgacgatttggatctcgaagatattccccaggccttagtcgcaaccagccccccttctcacagccatatggaagatgaaatctttaatcaatccagctcaactcccactagtaccacctcgtctagcccgatacccccctccccagctaactgcaccactgaaaacagtgaagacgataaaaaacggggcaggtcgacagatagcgaagtgtctcagagccctgctaagaacgggagcaagccagttcattctaatcagcacccacaaagtcccgcagttccacccacatatccctctggccccccacctgctgcctccgccctctcaacaacccctggaaacaatggcgttccagcaccggcggcccctccatctgcactaggtccaaaggcttcccccgcccccagccacaacagcggcacgcccgcaccttacgcacaggccgtggccccacccgccccatccgggccttctactactcaaccccgcccccccagtgtgcagccgtcgggcggaggaggcggcggttctggcggaggcggaagtagttcaagtagcaattcttcagccggcggaggggcaggcaaacagaatggagcaacatcttatagtagcgttgtcgctgatagccccgctgaggtcgctctgtcatcctcaggaggtaacaacgcctcctcccaggccttgggtccaccttccggcccacacaacccgccaccctccacgagtaaggagccttcagccgctgcacctactggcgccggaggcgtggctcccggaagcggtaacaatagcggtggaccctccctcctcgttcccctccctgtgaaccctcccagtagtcctactccatcgttctctgatgccaaggcagccggtgccctgttgaacgggccgccccaattctctacagctccggaaatcaaagccccagagccactcagttccttgaagagcatggctgaaagagcagctatctcctccggcattgaggatccagtccctacactacacttgaccgagcgtgatattatattgtcttccacatctgccccccccgccagtgcacagccgccactgcagctctccgaggtgaatatccccctttccttaggcgtatgtccactaggacccgtgccgttgactaaggagcagttataccagcaggccatggaggaagccgcatggcatcatatgccacacccttccgatagtgaacgcatccggcaatatttgccccgcaacccatgtccgacccccccataccaccatcagatgccgcccccacatagcgatacagtggagttctaccaaagactgagtactgagactctcttctttattttctattatttagagccacgcgacgttaggacggcctgggttgattccgaggccgggcctttgcgccatacctccgcgccgcttcccgtggctcactggttaactaggggccctagccctgcactgcttcagcagcctcaatcccgacctacaccactgtgtagctccgctcactcacaggcatccctggaaaccactggagaactgtcttctcccctgccaacgcctctactgtag

SEQ ID NO: 344771 - DNA, 1716 bp, Artificial Sequence
  derived and/or modified sequence
atgctggagaccatcctgaggatgctggacaatgacagcatcctggtggatgccatcaggaagatcaaggatgatgtggagtactacgtggacagcagccaggaccctgactttgaggagaatgagttcctgtatgatgacctggacctggaggacatcccccaggccctggtggccaccagcccccccagccacagccacatggaggatgagatcttcaaccagagcagcagcacccccaccagcaccaccagcagcagccccatcccccccagccctgccaactgcaccacagaaaattctgaagatgacaagaagaggggccgcagcacagattctgaggtgtcccagagccctgccaagaatggcagcaagcctgtgcacagcaaccagcacccccagagccctgctgtgccccccacctaccccagcggccccccacctgctgccagcgccctgagcaccaccccaggcaacaacggggtgcctgccccagctgccccacccagcgccctgggccccaaggccagccctgcccccagccacaacagcggcaccccagccccctatgcccaggccgtggcccccccagcccccagcggccccagcaccacccagcccaggcctccttctgtgcagcccagcggcggcggcggcggcggcagcggcggcggcggcagcagcagcagcagcaacagcagcgctgggggcggggccggcaagcagaatggagccaccagctacagctctgtggtggccgacagccctgctgaggtggccctgagcagcagcggcggcaacaatgccagcagccaggccctgggcccccccagcggcccccacaaccccccacccagcaccagcaaggagcccagcgctgctgcccccactggagctggaggagtggcccctggcagcggcaacaacagcggcggccccagcctgctggtgcccctgcctgtgaacccccccagcagccccacccccagcttcagtgatgccaaggctgctggggccctgctgaatggccccccccagttcagcacagcccctgagatcaaggcccctgagcccctgagcagcctgaagtccatggccgagagagctgccatcagcagcggcatcgaggaccctgtgcccaccctgcacctgacagagcgggacatcatcctgagcagcaccagcgcccccccagccagcgcccagccccccctgcagctgtctgaggtgaacatccccctgagcctgggcgtgtgccccctgggccctgtgcccctgaccaaggagcagctgtaccagcaggccatggaggaggccgcctggcaccacatgccccaccccagcgacagcgagcgcatccggcagtacctgcccaggaacccctgccccaccccaccctaccaccaccagatgcccccaccccacagcgacacagtggagttctaccagaggctgagcacagagaccctcttcttcatcttctactacctggagcccagagatgtgaggacagcctgggtggacagcgaggccggccccctgcggcacaccagcgcccccctgcctgtggcccactggctgacccggggccccagccctgccctgctgcagcagccccagagccggcccacccccctgtgcagcagcgcccacagccaggccagcctggagaccactggagagctgagcagccccctgcccacccccctgctgtag

SEQ ID NO: 344772 - DNA, 1716 bp, Artificial Sequence
  derived and/or modified sequence
atgctggagaccatcctgcggatgctggacaacgacagcatcctggtggacgctatccgaaagatcaaggacgatgtcgaatactacgtcgattcatctcaggaccctgactttgaggagaatgagttcctgtacgatgatctagacctcgaggatatccctcaggctttagtcgcaacaagcccaccaagccactcccatatggaggatgaaatttttaatcagagttccagcactccgacatctaccacatcctctagtccaattcccccatcacccgccaactgtaccaccgaaaattctgaagacgacaagaaacgaggacggagtaccgattctgaggttagccagtctcctgcaaagaatggctccaagcctgtgcattcgaaccagcacccccagtctccagccgtgcctcccacctacccttctggtcctccacccgctgccagcgcgctgtctaccacgcccggaaacaatggagtgcctgcccccgccgcccctccatccgccctcgggcctaaggccagccccgcgccatcccacaattcaggaacaccggcaccctacgcccaggcagtggccccacccgccccttcaggaccttccactacgcagcctcgaccgccttctgtccagccatccgggggaggaggcggcggttccggtggcggaggatcttcctcgagctccaatagtagcgccggcggcggggccggtaagcagaacggcgctaccagctactcctcagtggtagctgactcccctgctgaagtcgccctgtcatccagtgggggtaataacgccagttcacaggccctgggtccgccgtccgggccccataacccgccaccctcgactagcaaagagccttcagctgcagcccctactggagcagggggggtggcacctggttctggaaacaacagtggcgggccctcattgctggtgcctctgcctgtgaaccctccatcatctccgaccccctccttttcagacgctaaggctgccggagcgttgttgaacgggccgcctcagttttctacggcccccgaaatcaaagctcctgagcccctgtcaagcctgaaatctatggcagagagagcggccatttcttccggaattgaggacccagtgccaacactgcatctgacagaacgtgatatcatactgtcttccactagtgctccccccgcatctgctcaacctcctctgcagctgagtgaggttaacatccctctctctctgggggtgtgtcccttggggcctgttccactgacaaaggaacagctatatcagcaggcaatggaagaagccgcctggcatcacatgcctcaccctagcgactctgaaagaattcgccagtacctcccccggaatccctgccccaccccaccttatcatcatcagatgccacctccccattctgacactgtggagttctatcagcgcctatccaccgagaccctgtttttcatcttttactatctcgagccacgggacgtgcgaacagcatgggtggattccgaggctggcccccttcggcacacctcagccccgctgcctgtcgcacactggctgacaagaggcccatctccagccctgctgcagcagccacaatcccggccgaccccactgtgcagtagcgctcactctcaggcttctttggagactacaggtgaattgagcagccccctgccaacacctctgctgtag

SEQ ID NO: 344773 - DNA, 1716 bp, Artificial Sequence
  derived and/or modified sequence
atgctggagacaatcttacgaatgcttgacaatgactctattctagtcgacgctatccggaagattaaggacgatgtggaatattatgttgactcgtcccaagatccagatttcgaggagaatgaattcctgtatgatgaccttgatctggaggatattccccaagctctcgtcgccacctcaccaccatctcactcccacatggaagacgagatcttcaatcagtcctcctccacgcctacttccactacttcatccagccctatccctccttctcccgctaactgcacaacagagaatagcgaagatgataagaaacgtggcaggagtacagacagcgaggtcagccagtcaccggcaaaaaacggcagcaagccagtgcactcaaatcagcacccccagtcgccagcagtcccccctacctatccatccggtcccccaccagcggctagtgcactgagtaccactcctggtaataacggagtaccagccccagccgcacctcccagtgccctgggacccaaagcaagccctgccccatctcacaactccgggacacccgcaccgtatgcccaagcggttgcacctccggctccttcaggcccttccactacgcaaccgagaccccctagcgtacaacctagcggcggagggggaggtggtagcgggggaggaggcagttcaagctcctcaaatagctctgccggtgggggagctggtaagcagaacggagcaacttcctacagttccgtggtggcggattcccctgccgaagtcgcactgagctcctctggtggcaataatgcgtctagccaggcactgggacctccctccgggccacataacccgcctccaagtactagcaaggaaccatctgctgcagcacccacaggtgcaggcggtgtagcccctggcagcggcaataacagtgggggtcccagcctgcttgtaccgctacctgtgaatcctccttcgagtcccaccccaagtttctccgatgcaaaggcagctggggctctattgaacggtccaccacagttctccactgccccagaaattaaagccccagaacccctcagttccttgaagtcaatggcggagcgcgcagccatatcctctggcatcgaggacccggtgcctaccttacatcttacagagagagatattattctgtccagcacgagcgccccaccagccagcgcccaaccgcctttacagttgtccgaggtgaacattcccctgagtctgggggtttgccccctgggccctgttccattaacaaaagagcagctctaccagcaggctatggaagaggccgcttggcatcatatgccacacccaagcgactctgaacgcatcagacagtacctcccccgtaatccttgtccaactccgccatatcatcaccaaatgccacctccacacagtgatacagtagaattctaccagaggctgagcaccgagactctcttctttatattttactaccttgagccccgtgacgtgcggacagcttgggtagacagcgaggccggtccgttgagacacacgtctgcaccactccctgtagcccattggttgactcggggtccttccccagcccttctgcagcagcctcagtcacgaccaaccccattatgcagctcagcgcatagccaagcctctctggagaccaccggcgaactaagctccccactgcccacacccctactgtag

SEQ ID NO: 344774 - DNA, 1716 bp, Artificial Sequence
  derived and/or modified sequence
atgctggagaccatcctgagaatgctggacaacgacagcatcctggtggacgccatcagaaagatcaaggacgacgtggagtactacgtggacagcagccaggaccccgacttcgaggagaacgagttcctgtacgacgacctggacctggaggacatcccccaggccctggtggccaccagcccccccagccacagccacatggaggacgagatcttcaaccagagcagcagcacccccaccagcaccaccagcagcagccccatcccccccagccccgccaactgcaccaccgagaacagcgaggacgacaagaagagaggcagaagcaccgacagcgaggtgagccagagccccgccaagaacggcagcaagcccgtgcacagcaaccagcacccccagagccccgccgtgccccccacctaccccagcggccccccccccgccgccagcgccctgagcaccacccccggcaacaacggcgtgcccgcccccgccgccccccccagcgccctgggccccaaggccagccccgcccccagccacaacagcggcacccccgccccctacgcccaggccgtggccccccccgcccccagcggccccagcaccacccagcccagaccccccagcgtgcagcccagcggcggcggcggcggcggcagcggcggcggcggcagcagcagcagcagcaacagcagcgccggcggcggcgccggcaagcagaacggcgccaccagctacagcagcgtggtggccgacagccccgccgaggtggccctgagcagcagcggcggcaacaacgccagcagccaggccctgggcccccccagcggcccccacaaccccccccccagcaccagcaaggagcccagcgccgccgcccccaccggcgccggcggcgtggcccccggcagcggcaacaacagcggcggccccagcctgctggtgcccctgcccgtgaacccccccagcagccccacccccagcttcagcgacgccaaggccgccggcgccctgctgaacggccccccccagttcagcaccgcccccgagatcaaggcccccgagcccctgagcagcctgaagagcatggccgagagagccgccatcagcagcggcatcgaggaccccgtgcccaccctgcacctgaccgagagagacatcatcctgagcagcaccagcgccccccccgccagcgcccagccccccctgcagctgagcgaggtgaacatccccctgagcctgggcgtgtgccccctgggccccgtgcccctgaccaaggagcagctgtaccagcaggccatggaggaggccgcctggcaccacatgccccaccccagcgacagcgagagaatcagacagtacctgcccagaaacccctgccccacccccccctaccaccaccagatgccccccccccacagcgacaccgtggagttctaccagagactgagcaccgagaccctgttcttcatcttctactacctggagcccagagacgtgagaaccgcctgggtggacagcgaggccggccccctgagacacaccagcgcccccctgcccgtggcccactggctgaccagaggccccagccccgccctgctgcagcagccccagagcagacccacccccctgtgcagcagcgcccacagccaggccagcctggagaccaccggcgagctgagcagccccctgcccacccccctgctgtag

SEQ ID NO: 344775 - protein, 221 aa, Artificial Sequence
  derived and/or modified sequence
MSLTVVSMACVGFFLLQGAWPLMGNHRKPSLLAHPGPLLKSGETVILQCWSDVMFEHFFLHREGISEDPSRLVGQIHDGVSKANFSIGPLMPVLAGTYRCYGSVPHSPYQLSAPSDPLDIVITGLYEKPSLSAQPGPTVQAGENVTLSCSSWSSYDIYHLSREGEAHERRLRAVPKVNRTFQADFPLGPATHGGTYRCFGSFRALPCVWSNSSDPLLVSVT

SEQ ID NO: 344776 - protein, 333 aa, Artificial Sequence
  derived and/or modified sequence
MSLTVVSMACVGFFLLQGAWPLMGGQDKPFLSARPSTVVPRGGHVALQCHYRRGFNNFMLYKEDRSHVPIFHGRIFQESFIMGPVTPAHAGTYRCRGSRPHSLTGWSTPSNPLVIMVTGNHRKPSLLAHPGPLLKSGETVILQCWSDVMFEHFFLHREGISEDPSRLVGQIHDGVSKANFSIGPLMPVLAGTYRCYGSVPHSPYQLSAPSDPLDIVITGLYEKPSLSAQPGPTVQAGENVTLSCSSWSSYDIYHLSREGEAHERRLRAVPKVNRTFQADFPLGPATHGGTYRCFGSFRALPCVWSNSSDPLLVSVTGNPSSSWPSPTEPSSKS

SEQ ID NO: 344777 - DNA, 1002 bp, Artificial Sequence
  derived and/or modified sequence
atgagcctgaccgtggtgagcatggcctgcgtgggcttcttcctgctgcagggcgcctggcccctgatgggcggccaggacaagcccttcctgagcgccagacccagcaccgtggtgcccagaggcggccacgtggccctgcagtgccactacagaagaggcttcaacaacttcatgctgtacaaggaggacagaagccacgtgcccatcttccacggcagaatcttccaggagagcttcatcatgggccccgtgacccccgcccacgccggcacctacagatgcagaggcagcagaccccacagcctgaccggctggagcacccccagcaaccccctggtgatcatggtgaccggcaaccacagaaagcccagcctgctggcccaccccggccccctgctgaagagcggcgagaccgtgatcctgcagtgctggagcgacgtgatgttcgagcacttcttcctgcacagagagggcatcagcgaggaccccagcagactggtgggccagatccacgacggcgtgagcaaggccaacttcagcatcggccccctgatgcccgtgctggccggcacctacagatgctacggcagcgtgccccacagcccctaccagctgagcgcccccagcgaccccctggacatcgtgatcaccggcctgtacgagaagcccagcctgagcgcccagcccggccccaccgtgcaggccggcgagaacgtgaccctgagctgcagcagctggagcagctacgacatctaccacctgagcagagagggcgaggcccacgagagaagactgagagccgtgcccaaggtgaacagaaccttccaggccgacttccccctgggccccgccacccacggcggcacctacagatgcttcggcagcttcagagccctgccctgcgtgtggagcaacagcagcgaccccctgctggtgagcgtgaccggcaaccccagcagcagctggcccagccccaccgagcccagcagcaagagctag

SEQ ID NO: 344778 - DNA, 1002 bp, Artificial Sequence
  derived and/or modified sequence
atgtctctgaccgtagtctcaatggcttgtgtggggttctttcttcttcagggagcctggccacttatgggcgggcaggataaaccatttctgtctgctaggccttcaactgtggtccctaggggcggtcacgttgccctgcaatgccattaccggagagggtttaataatttcatgctttacaaagaagaccgaagccacgtgcctatctttcacggaagaatcttccaggagtcattcattatgggtccagtgacacctgcccacgcggggacttatcgttgccggggctccagaccgcatagcttaaccgggtggtcaacgccctcgaatcctctggtgataatggtcacagggaatcatcgtaagcccagcctgctggcccacccaggtcctctgctcaagtccggcgaaacagttattctgcagtgctggtctgatgttatgttcgagcacttctttctgcacagggagggcatcagcgaggacccttccagactcgtggggcagatccatgacggagtctcaaaagcaaatttctccatcggccccctcatgccagtgttagcagggacatatcgatgttatgggagcgtgccccattctccctatcaacttagcgcaccctcagaccctttagatattgtgatcaccggactgtacgagaaaccatccctctcggcccaaccagggcccaccgtccaagcgggggagaatgtgacattaagctgttcttcttggagttcatacgacatttatcatttatctagggagggggaggctcatgaaagaagacttcgtgccgtgcccaaagttaaccggactttccaggctgattttcctctgggccccgcaacccatggcggtacttacaggtgtttcggcagtttcagggcgttgccttgcgtgtggagtaacagctccgacccactcttggtcagcgtgacgggcaacccctccagtagctggccttctcctactgaaccctctagtaagtcctag

SEQ ID NO: 344779 - DNA, 1002 bp, Artificial Sequence
  derived and/or modified sequence
atgagcctgactgtggtgtccatggcctgtgtgggcttcttcctgctgcagggcgcctggcccctgatgggcggccaggacaagcccttcctgagcgcccggcccagcacagtggtgccccggggcggccacgtggccctgcagtgccactaccgccggggcttcaacaacttcatgctgtacaaggaggacaggagccacgtgcccatcttccacggccgcatcttccaggagagcttcatcatgggccctgtgaccccagcccacgccggcacctaccgctgccggggcagccggccccacagcctgaccggctggagcacccccagcaaccccctggtgatcatggtgacaggcaaccacaggaagcccagcctgctggcccaccctggccccctgctgaagagcggggagaccgtcatcctgcagtgctggagcgatgtgatgtttgagcacttcttcctgcaccgggagggcatcagcgaggaccccagccggctggtgggccagatccatgatggagtgtccaaggccaacttcagcatcggccccctgatgcctgtgctggccggcacctaccgctgctacggctctgtgccccacagcccctaccagctgagcgcccccagcgaccccctggacatcgtcatcaccggcctgtatgagaagcccagcctgagcgcccagcccggccccaccgtgcaggccggggagaatgtgaccctgagctgcagctcctggagcagctatgacatctaccacctgagccgggagggggaggcccacgagcggcggctgcgggctgtgcccaaggtgaacagaaccttccaggccgacttccccctgggccctgccacccatggaggcacctaccgctgcttcggcagcttccgggccctgccctgtgtgtggagcaacagcagtgaccccctgctggtgtctgtgacaggcaaccccagcagctcctggcccagccccacagagcccagcagcaagagctag

SEQ ID NO: 344780 - DNA, 687 bp, Artificial Sequence
  derived and/or modified sequence
atgtcgctcactgtcgtcagcatggcgtgcgttgggttcttcttgctgcagggggcctggccactcatgggaaaccacagaaaaccttccctcctggcccacccagggcccctgctgaaatcaggagagacagtcatcctgcaatgttggtcagatgtcatgtttgagcacttctttctgcacagagaggggatctctgaggacccctcacgcctcgttggacagatccatgatggggtctccaaggccaacttctccatcggtcccttgatgcctgtccttgcaggaacctacagatgttatggttctgttcctcactccccctatcagttgtcagctcccagtgaccccctggacatcgtgatcacaggtctatatgagaaaccttctctctcagcccagccgggccccacggttcaggcaggagagaacgtgaccttgtcctgtagctcctggagctcctatgacatctaccatctgtccagggaaggggaggcccatgaacgtaggctccgtgcagtgcccaaggtcaacagaacattccaggcagactttcctctgggccctgccacccacggagggacctacagatgcttcggctctttccgtgccctgccctgcgtgtggtcaaactcaagtgacccactgcttgtttctgtcacaggaaacccttcaagtagttggcct

SEQ ID NO: 344781 - DNA, 999 bp, Artificial Sequence
  derived and/or modified sequence
atgtcgctcactgtcgtcagcatggcgtgcgttgggttcttcttgctgcagggggcctggccactcatgggtggtcaggacaaacccttcctgtctgcccggcccagcactgtggtgcctcgaggaggacacgtggctcttcagtgtcactatcgtcgtgggtttaacaatttcatgctgtacaaagaagacagaagccacgttcccatcttccacggcagaatattccaggagagcttcatcatgggccctgtgaccccagcacatgcagggacctacagatgtcggggttcacgcccacactccctcactgggtggtcgacacccagcaaccccctggtgatcatggtcacaggaaaccacagaaaaccttccctcctggcccacccagggcccctgctgaaatcaggagagacagtcatcctgcaatgttggtcagatgtcatgtttgagcacttctttctgcacagagaggggatctctgaggacccctcacgcctcgttggacagatccatgatggggtctccaaggccaacttctccatcggtcccttgatgcctgtccttgcaggaacctacagatgttatggttctgttcctcactccccctatcagttgtcagctcccagtgaccccctggacatcgtgatcacaggtctatatgagaaaccttctctctcagcccagccgggccccacggttcaggcaggagagaacgtgaccttgtcctgtagctcctggagctcctatgacatctaccatctgtccagggaaggggaggcccatgaacgtaggctccgtgcagtgcccaaggtcaacagaacattccaggcagactttcctctgggccctgccacccacggagggacctacagatgcttcggctctttccgtgccctgccctgcgtgtggtcaaactcaagtgacccactgcttgtttctgtcacaggaaacccttcaagtagttggccttcacccacagaaccaagctccaaatct

SEQ ID NO: 344782 - DNA, 1002 bp, Artificial Sequence
  derived and/or modified sequence
atgagcctgaccgtggtgagcatggcctgcgtgggcttcttcctgctccaaggagcatggccactaatgggaggacaggacaagccttttttatccgccagaccttccaccgttgttccacgcggaggacacgtggccctgcaatgccactaccgacgggggtttaacaattttatgttatacaaggaggatagatctcacgtgcccatcttccacggcaggattttccaggaaagctttatcatggggcccgtgactccggcccacgccgggacatatagatgccgggggagtagacctcattccctgacgggctggagcactccttcaaatcctctcgtgatcatggttacagggaatcaccgaaagcccagtctcttggctcacccgggccctctgctgaaatctggagagacagtgattctgcaatgctggtcagatgtgatgtttgaacatttctttttgcatagagagggcatctcggaggatccaagccgtctggtgggccaaatacacgatggtgtctctaaagctaattttagtatcggacctctgatgccagtactggcggggacatatagatgttatggatctgttcctcacagcccctaccagctgagtgctccctctgaccctctggacattgtgatcactggcctctatgaaaaaccaagtctgagcgctcaaccggggcccacagtgcaagcaggcgagaatgtcaccctgtcctgtagttcttggagttcttatgatatatatcacctgagccgtgagggagaagcgcacgaaaggaggttgcgagctgttccaaaagtcaatcgcacttttcaggcagactttccgttgggccccgccacccacggggggacttatcgctgtttcggcagttttcgggcgcttccttgtgtgtggtctaatagtagcgacccgctgctcgtgtctgtgacaggaaatcctagctcttcctggcccagccccacagaaccctcgtccaagtcatag

SEQ ID NO: 344783 - DNA, 1002 bp, Artificial Sequence
  derived and/or modified sequence
atgagcctcacagtcgtgagtatggcatgcgtcgggtttttcttgctgcaaggagcctggcccttaatgggaggccaggacaagccattcctttcagccaggccatcaaccgtggtgcctcgcggtggacatgtggctctgcaatgtcattaccgtcgtggatttaataatttcatgctgtacaaggaagatcggtcacatgtcccaatctttcacggccgaatctttcaggagagtttcatcatgggtcccgtgactcccgctcacgcgggtacctaccgatgtcgcggaagtcgccctcactcactgacgggatggagcacccctagcaatcccttggtgattatggttaccggaaaccacaggaaaccaagcctacttgcccaccctggacccttgctgaaaagcggcgaaaccgttatcctccaatgctggagcgacgtgatgttcgaacatttcttcttgcacagagaagggatatcggaagatccatcccgcctggtgggacaaatccacgatggggtcagtaaggccaattttagcatagggcctcttatgcctgttctagccggaacctaccgctgctatggctccgtgcctcacagcccctatcaactctctgcccctagcgatccgttagacatcgttatcactggcttgtacgagaagccgtccctttcagcccagccaggcccaactgtacaggcaggggaaaacgtgacgctgtcatgctcctcatggtcatcgtacgacatttatcacctgtcacgagagggggaagcccacgagagacgactgagggcggttccaaaggtgaaccggacattccaggctgacttcccactcgggccagctacccacggagggacatacaggtgcttcggctctttcagggccctgccttgcgtgtggtcaaatagttcagatcccttgttggtgagcgttacaggcaacccgtcctccagctggcccagccccaccgaacctagcagcaagtcctag

SEQ ID NO: 344784 - DNA, 371 bp, Artificial Sequence
  derived and/or modified sequence
acgtgcgcgcgaagacgtggggacgcaggcgggtcgtagagagcggagcctcttaaacagaatcttacctgtaaaactcaggagccgagaagctttaagaacagtgaggttgaagggcacaggctcttggtccttggcagcgatattaggaggcgtgcctagggaacctcggattccggggagctggacgtgaaactctgtggtggaatagaaatcctcagggcatgagctatacctaaaacgtaatggtattaagaattctggttcagccgtctgtatatctccccagatacctgaaactgaccacctgagtacgttttcccattgctgagctgtttccctgatatctggccatgcaacggagatcaaga

SEQ ID NO: 344785 - DNA, 666 bp, Artificial Sequence
  derived and/or modified sequence
atgagcctgaccgtggtgagcatggcctgcgtgggcttcttcctgctgcagggcgcctggcccctgatgggcaaccacagaaagcccagcctgctggcccaccccggccccctgctgaagagcggcgagaccgtgatcctgcagtgctggagcgacgtgatgttcgagcacttcttcctgcacagagagggcatcagcgaggaccccagcagactggtgggccagatccacgacggcgtgagcaaggccaacttcagcatcggccccctgatgcccgtgctggccggcacctacagatgctacggcagcgtgccccacagcccctaccagctgagcgcccccagcgaccccctggacatcgtgatcaccggcctgtacgagaagcccagcctgagcgcccagcccggccccaccgtgcaggccggcgagaacgtgaccctgagctgcagcagctggagcagctacgacatctaccacctgagcagagagggcgaggcccacgagagaagactgagagccgtgcccaaggtgaacagaaccttccaggccgacttccccctgggccccgccacccacggcggcacctacagatgcttcggcagcttcagagccctgccctgcgtgtggagcaacagcagcgaccccctgctggtgagcgtgacctag

SEQ ID NO: 344786 - DNA, 666 bp, Artificial Sequence
  derived and/or modified sequence
atgagcctcacggtggtgtccatggcttgtgtggggtttttcttgctccagggggcatggccactgatgggcaatcatagaaaaccttccctactggcgcaccccggccccctgctgaaatctggggaaaccgtgatcctgcagtgctggagcgatgtgatgttcgaacacttcttcctgcaccgtgaggggatctctgaagacccatcacggttagttggccagatccatgacggcgtctccaaggcgaatttttctattggacccctaatgcccgttctcgcaggaacgtaccgctgttacggctccgtgccacatagtccgtaccagctctccgccccaagcgacccactcgacatagtgataactggtctgtacgaaaagcctagcctgtccgcacagcctggacccactgtgcaagcaggtgagaacgtaacgctgtcctgctcatcctggtccagctacgacatataccacctgtcccgtgagggagaagcccacgaaaggagactccgggcggttcccaaggtcaaccgaacattccaagctgactttccattagggccagccacacatgggggaacctatcggtgtttcggttccttccgcgcgctcccttgcgtgtggtctaacagctccgacccactgttggtctctgtaacctag

SEQ ID NO: 344787 - DNA, 666 bp, Artificial Sequence
  derived and/or modified sequence
atgagcctgactgtggtgtccatggcctgtgtgggcttcttcctgctgcagggcgcctggcccctgatgggcaaccacaggaagcccagcctgctggcccaccctggccccctgctgaagtctggagagaccgtcatcctgcagtgctggagcgatgtgatgtttgagcacttcttcctgcaccgggagggcatcagcgaggaccccagccggctggtgggccagatccatgatggagtgtccaaggccaacttcagcatcggccccctgatgcctgtgctggccggcacctaccgctgctacggctctgtgccccacagcccctaccagctgagcgcccccagcgaccccctggacatcgtcatcaccggcctgtatgagaagcccagcctgagcgcccagcccggccccaccgtgcaggccggagaaaatgtgaccctgagctgcagctcctggagcagctatgacatctaccacctgagccgggagggggaggcccatgaaagaaggctgcgggctgtgcccaaggtgaacagaaccttccaggccgacttccccctgggccctgccacccacggcggcacctaccgctgcttcggcagcttccgggccctgccctgtgtgtggagcaacagcagtgaccccctgctggtgtctgtgacctag

SEQ ID NO: 344788 - DNA, 666 bp, Artificial Sequence
  derived and/or modified sequence
atgagcctgaccgtggtgagcatggcctgcgtgggcttcttcctgctgcaaggggcctggccattgatgggaaaccatcggaagccctctctcttggctcaccctggcccgcttctgaagagtggcgaaaccgtcatcctgcagtgctggtcagacgtgatgtttgaacatttcttcctccatagggaaggcatatccgaggacccatcgaggctggtgggtcagattcacgatggggtctctaaggccaatttcagcattggtccacttatgcctgtcctggccggtacctatcgctgctacggtagtgtgccgcactctccctaccagttgagtgctcccagcgatcccctggacatcgtcattaccggactgtatgaaaagccctccctgtctgcacagccagggccaaccgtacaggcaggggagaatgtcactctttcctgctctagctggtcttcatacgacatataccatttatccagagagggcgaggcacacgaacggcgtctgagggcggtacctaaggtgaatcgcaccttccaagctgattttccactaggacctgctacccacggcggaacctacaggtgtttcggttccttccgagcactcccttgtgtttggagtaatagctcagacccccttttagtctcagtcacatag

SEQ ID NO: 344789 - DNA, 666 bp, Artificial Sequence
  derived and/or modified sequence
atgtctctgactgtggtgtcgatggcttgcgtgggtttcttcctgctgcagggcgcttggcccctcatggggaaccacagaaagccctccctgcttgctcacccgggaccattgctgaagagcggcgagacagtcattttacagtgttggtctgacgtgatgtttgagcatttctttcttcacagggagggcatcagcgaggaccctagcagattggtggggcagatacacgatggcgtcagtaaagctaacttttccattggaccactgatgccggttctggccggtacctatcgctgctacggtagcgtgccacatagtccctaccagctttcagctccatcagatccactggacattgtcataacggggctctacgaaaagccttccttatctgcacagccaggacctaccgtccaagctggcgaaaacgttaccttgagttgtagctcatggtcaagctatgatatttatcatctcagccgcgagggagaggcacacgaacgcaggctgcgggcagttcctaaggttaataggacattccaagccgacttccctctcgggccagctactcatggtggcacttatcggtgctttggttcctttagagcccttccttgcgtatggtccaatagctcggatcctctgttagtgtctgtgacatag

SEQ ID NO: 344790 - DNA, 285 bp, Artificial Sequence
  derived and/or modified sequence
tgtacttctagttgtacaccgtcctgctgtcaacagtccagctgtcagccggcttgttgtacatccagcccttgccagcaagcttgctgtgttcctgtctgttgtaaaacggtatgctgtaagccgtcctcctgtcaaccagcttgttgtatcagttccccatgtcagcagtcttgttgcgttccagtgtgctgtaagcccatttgttgtgtcccaccagcctgctgtaccacctcatgctgccggccttctagtagcgtgagtctgctctgtagaccagtgtag

SEQ ID NO: 344791 - protein, 258 aa, Artificial Sequence
  derived and/or modified sequence
MIPLQKDNQEEGVCPICQESLKEAVSTNCGHLFCRVCLTQHVEKASASGVFCCPLCRKPCSEEVLGTGYICPNHQKRVCRFCEESRLLLCVECLVSPEHMSHHELTIENALSHCKERLNRRSRKLRKDIAELQRLKAQQEKKLQALQFQVDHGNHRLEAGPESQHQTREQLGALPQQWLGQLEHMPAEAARILDISRAVTQLRSLVIDLERTAKELDTNTLKNAGDLLNRSAPQKLEVIYPQLEKGVSELLLQPPQKL

SEQ ID NO: 344792 - DNA, 777 bp, Artificial Sequence
  derived and/or modified sequence
atgatccccctgcagaaggacaaccaggaggagggcgtgtgccccatctgccaggagagcctgaaggaggccgtgagcaccaactgcggccacctgttctgcagagtgtgcctgacccagcacgtggagaaggccagcgccagcggcgtgttctgctgccccctgtgcagaaagccctgcagcgaggaggtgctgggcaccggctacatctgccccaaccaccagaagagagtgtgcagattctgcgaggagagcagactgctgctgtgcgtggagtgcctggtgagccccgagcacatgagccaccacgagctgaccatcgagaacgccctgagccactgcaaggagagactgaacagaagaagcagaaagctgagaaaggacatcgccgagctgcagagactgaaggcccagcaggagaagaagctgcaggccctgcagttccaggtggaccacggcaaccacagactggaggccggccccgagagccagcaccagaccagagagcagctgggcgccctgccccagcagtggctgggccagctggagcacatgcccgccgaggccgccagaatcctggacatcagcagagccgtgacccagctgagaagcctggtgatcgacctggagagaaccgccaaggagctggacaccaacaccctgaagaacgccggcgacctgctgaacagaagcgccccccagaagctggaggtgatctacccccagctggagaagggcgtgagcgagctgctgctgcagcccccccagaagctgtag

SEQ ID NO: 344793 - DNA, 777 bp, Artificial Sequence
  derived and/or modified sequence
atgattcccctccagaaagataatcaagaagagggggtctgccctatctgtcaagaaagtctgaaggaagctgtgtcgacaaattgcggacaccttttctgcagggtatgtcttactcagcatgtggagaaggcctcagcgagtggcgtcttctgctgccccctgtgcaggaagccatgctctgaggaggtactcgggacgggatatatttgccccaaccatcagaagagagtctgccggttctgtgaggaatcaaggctcttgctctgcgtggaatgcctggtaagtccagagcatatgtcacaccatgaactcacaatcgagaatgctctgtctcattgcaaagagcggttgaaccgccgcagtaggaaactaaggaaagacatcgctgaactgcagcgtctgaaggctcagcaggagaagaaactccaagctctgcagttccaggtcgatcatggcaatcaccggctcgaggccggcccggaaagccagcatcagaccagagagcagttgggagctctgccacaacagtggctgggccaactggagcacatgccagcagaagcggcgcgaattcttgatatctcacgggcagtgactcagttgcggtctctcgtgattgacctggagcgcaccgccaaagagcttgatacaaacaccctgaagaatgcaggggatctcctgaacaggtcagccccccagaagcttgaagttatatatccacagctggaaaaaggtgtgtcagaactgttgctgcaaccacctcaaaaactttag

SEQ ID NO: 344794 - DNA, 777 bp, Artificial Sequence
  derived and/or modified sequence
atgattccattacagaaggacaaccaggaggaaggtgtttgtcctatttgccaggagagccttaaggaggccgtatcgacgaattgcggtcatcttttctgtagagtctgcctaacccaacatgtggaaaaagccagtgcaagtggagtgttttgctgccctctatgccgcaagccatgttctgaggaagtcttgggaaccggttacatttgtccaaaccaccagaagcgcgtttgccgcttctgcgaagaatccaggctactgctttgtgtggaatgtctggtctcacccgagcacatgagccaccatgaacttactatcgagaacgccctgtcccactgcaaggagcggctgaataggaggtctaggaaacttcgtaaggatatcgccgagctgcaaaggttgaaagcacaacaggaaaagaaacttcaagccctccagttccaggtcgatcacggcaatcaccgcctggaagctggaccagagagccagcaccagactcgcgagcagctcggcgcactcccccagcagtggctcgggcaactagaacacatgcctgcagaggcagccagaatcctcgatattagtcgcgctgtgacgcaactgcgcagccttgtaattgatctcgagcgaaccgctaaagaactcgacaccaacactctgaaaaacgctggtgacctgttaaaccgatccgccccccaaaagttggaggtgatctaccctcagctggaaaagggcgtgagtgaacttcttcttcagccgccgcagaaactgtag

SEQ ID NO: 344795 - DNA, 777 bp, Artificial Sequence
  derived and/or modified sequence
atgatccccctgcagaaggacaaccaggaggagggcgtgtgccccatctgccaggagagcctgaaggaggccgtgtccaccaactgtggccacctgttctgccgggtgtgcctgacccagcacgtggagaaggccagcgccagcggggtcttctgctgccccctgtgcaggaagccctgcagcgaggaggtgctgggcaccggctacatctgccccaaccaccagaagagggtgtgccgcttctgtgaggagagccggctgctgctgtgtgtggagtgcctggtgtccccagagcacatgagccaccacgagctgaccattgaaaatgccctgagccactgcaaggagcggctgaacagaagaagcaggaagctgaggaaggacattgctgagctgcagaggctgaaggcccagcaggagaagaagctgcaggccctgcagttccaggtggaccacggcaaccaccggctggaggccggccctgagagccagcaccagacccgggagcagctgggcgccctgccccagcagtggctgggccagctggagcacatgcctgctgaggccgcccgcatcctggacatcagcagagctgtgacccagctgcggagcctggtgattgacctggagaggacagccaaggagctggacaccaacaccctgaagaatgctggggacctgctgaacagaagtgccccccagaagctggaggtgatctacccccagctggagaagggcgtgtctgagctgctgctgcagcccccccagaagctgtag

SEQ ID NO: 344796 - DNA, 777 bp, Artificial Sequence
  derived and/or modified sequence
atgatccccctgcagaaggacaaccaggaggagggcgtgtgccccatatgtcaggaatcactcaaagaagccgtgtctaccaattgcgggcacctgttctgccgtgtctgcctcacccagcatgttgagaaggcttctgcctcaggcgttttctgctgccctctgtgcagaaaaccatgctcagaagaggtgttaggcactggctacatatgccccaatcatcaaaagagagtctgtcgcttttgcgaagaatcccggcttctgctgtgtgtcgagtgtttagtttcccccgagcatatgtcccaccatgaacttacaattgaaaacgccttatcgcattgcaaggaacgcctcaacagaaggagccgaaaacttcgtaaagatatcgccgaattacaaaggcttaaagctcagcaggaaaaaaaacttcaggccctccagttccaggtcgaccacggcaaccaccgcctggaagccgggccagaatctcaacatcagacaagagaacagctgggggctctgccacaacagtggctcggacagctggagcatatgcccgcagaagcagccagaattctcgatatttcaagagccgtgacgcagttgaggtcactagtgattgatcttgagcgaaccgctaaggaattagacaccaataccctgaaaaacgccggcgacctgctgaataggtctgccccccagaagctggaagtgatatatccccaattggagaagggagtgtctgaactgctgcttcagccaccacagaaactgtag

SEQ ID NO: 344797 - DNA, 777 bp, Artificial Sequence
  derived and/or modified sequence
atgatccccctgcagaaggacaaccaggaggagggcgtgtgccccatttgtcaggaaagtctgaaagaggctgtgtccaccaactgcggccatttgttttgtagagtgtgtttaacgcagcatgtcgaaaaagcctccgcatcaggagttttttgctgccctctgtgcaggaaaccgtgctccgaagaggtactggggaccgggtatatttgcccaaatcaccagaaaagggtctgtcggttttgcgaggaatcccgattgcttctgtgtgttgagtgtttagtgtctcccgaacacatgtcacaccacgaactaaccatcgagaacgctctgtcccactgtaaagaaaggttaaaccggaggtctaggaagctcagaaaagacatcgctgagctccagcgcttaaaggctcagcaggagaaaaagttacaggcgctgcagtttcaggtggatcacggtaatcatcggctggaagcagggcccgaatcacagcaccagacacgggagcagctcggtgctctccctcaacagtggcttggacaacttgaacacatgcctgcggaggcagcccgaatcctagatatcagcagggctgtcactcaactcagatcattagtcatagacctggaacgcaccgctaaggaactcgataccaacactttgaaaaatgccggcgacttgctgaaccgcagcgcgcctcaaaaacttgaggtgatctatccacagctggaaaagggtgtgtccgaactgctgctgcagccaccgcagaagctgtag

SEQ ID NO: 344798 - DNA, 777 bp, Artificial Sequence
  derived and/or modified sequence
atgataccccttcagaaagacaaccaggaagagggcgtgtgccctatatgccaggagtccctcaaggaggcagtgagcacgaactgtggccacctcttctgcagagtgtgtttgacacagcatgtggagaaggccagtgcatcaggggtcttttgctgccctctgtgtagaaaaccttgttccgaggaggtactcggtactggctatatctgcccaaatcatcaaaagagagtgtgcagattctgtgaagaatcaaggctactgctatgtgtggaatgcctggtgtcccccgaacacatgtcacaccacgaactgacaatcgaaaacgctctttcccactgcaaggagcgcctgaaccgcagatctagaaagctcaggaaggacatcgctgaattacagaggcttaaagctcagcaggagaagaaattgcaggctctccagttccaggtggaccacggcaaccaccgactggaggctggcccagaatcccaacatcaaaccagagagcaactgggagctctccctcagcagtggctgggacaactcgagcatatgccagccgaggcagccagaatccttgatattagccgcgctgtgacccagttgcgtagcctggttattgacttggagagaactgcgaaggaactggatacaaatacacttaagaatgccggtgacctgctgaaccgcagcgcccctcaaaagctggaggttatctatcctcaactcgaaaaaggcgtgagcgaactattactccagcccccacagaagctgtag

SEQ ID NO: 344799 - DNA, 777 bp, Artificial Sequence
  derived and/or modified sequence
atgattcctctgcaaaaggacaatcaggaggagggggtctgcccaatatgtcaggaatccctcaaggaggccgtttccacgaactgtggacatttgttctgcagagtgtgcctgacacagcacgtggagaaggcctccgcctcaggggtcttctgttgccctctctgtcggaagccttgctccgaagaagtgctgggtaccggctacatctgccctaaccatcagaaacgcgtgtgtagattctgtgaggagtccagacttctgttatgcgtagagtgccttgtaagcccggaacatatgagtcaccatgaactcaccattgagaatgctcttagccattgtaaagagaggctgaataggagatccagaaaacttagaaaagacattgcagagttgcaaaggctgaaggcccagcaggagaaaaaactgcaggccctgcaatttcaggtagatcatggcaatcacaggctggaggctgggcctgaatcgcagcatcaaactcgggagcagttgggggcactgcctcaacagtggctgggtcagctcgaacacatgccagccgaagctgccagaattttggacatcagtcgtgcagtcactcaactccggtctctggtcatcgacctcgaaagaaccgccaaggaactggacactaataccttgaagaatgccggagatttgttgaaccggagcgctccccagaaattagaagttatataccctcagctcgaaaagggcgtatcagagcttctgcttcagcccccacagaagctgtag

SEQ ID NO: 344800 - DNA, 2086 bp, Artificial Sequence
  derived and/or modified sequence
ataagaaccactcatctgctggccatctctccaggtctagagccagagaagatgatctgaaattgtagcaggagaaattgaggtgtatgaaaaataatttcaagtttaacaaacacaaggaaaccgcagggtccatgtcaaagctgatgagctatttctgaaactcgtgaagaattgtggtttgtgtggtctatgtcacggcacccttgagggagagtgggcaattgcctgaacttggaggctgtgtcctgtccccaggctgctccagggctgcctccttccgactgggccttcttatctgggactgttgagggcaacaggccttccgaagaccagtgaagaaggaggccctgcaaacaggaggctgacagggtaggaacgaggccatgatccctttgcagaaggacaaccaggaggagggtgtctgccccatctgccaggagagcctgaaggaggccgtgagcaccaactgcggacatctcttctgtcgagtgtgcctgacacagcatgtggagaaggcctcagcctctggggtcttctgctgccccctctgccggaagccctgttctgaggaggtgctagggacaggctatatctgccccaaccaccagaagagggtgtgcaggttctgtgaggagagcagacttcttctatgtgtggaatgcctggtgtcccctgaacacatgtctcatcatgaactgaccattgaaaatgccctcagccactgcaaggaacgactcaatcgccggagcaggaagctcagaaaggacattgcagaacttcagcggctcaaggctcagcaggagaagaaactgcaggctctgcagtttcaggtagaccacgggaaccacaggctggaggctgggccggagagccagcaccaaaccagggaacagctgggtgccctccctcagcagtggctgggccagctggagcacatgccagcagaagcggccagaatccttgacatctccagggcagtaacacagctcagaagcctggtcattgatctggaaaggacggccaaggaattagacaccaacacactgaagaatgctggtgacttactgaacaggagtgctccacagaaattagaggttatttatccccagttggagaaaggagtcagtgaattgcttcttcagccccctcagaagctctgacctgttcatccctgggacacctcacttcaggctcacctcagcctcctctctctccttcctccaacctgtccaggcccccactgggtctacccagtgcatcttcgggcctgccagctcctgaacatgtcaccatttcttcatgtccacagtcatcacctgatgcctgaccctctgactcttggacgatagccagcctccttccaggacaggctcatgcttggggctgccactgtggaggtcggggcccatggtctccaggagcatttgtgaaatctccattttgcctgtaaactgatggtagtgcccatctctcacaatctcattcaaataggatcctccaggcctctgaatggcccaagctcatcagcagtgacaccacctcacatgtggagcccagctgagttcctgcagtacttgttgtctgtaccactcacctggcacttatttattattgttgtggaagacagactcaaagacagcctcccttcgtgatcctcacctcttggaattcatgcccttgtttggtcccctccccttgagtgtaagtgggatctgtgacttgcttctaatgaatggaataaggcaaaggtgatagggtgtcactctggcaactgtgttgcattgtatagaactcctccttgctggcccacccttttagagcccctcctaggagccaagagcagcttccagccaacaacaagcagaggccctcagtcttgtggctgcaagaacctgaattctgccaacaacccgagtgagcttggaagcagattcttccccaactgagccggataagaacctagtccagccaacaccttgattatagtcttgtgagtacctaagctgaggacccagtgaagctgtgccaaaatttcccacccacagaaacagtgtgacaataaatgtgtgtgtgtttttttgtt

SEQ ID NO: 344801 - DNA, 2004 bp, Artificial Sequence
  derived and/or modified sequence
gtgtatgaaaaataatttcaagtttaacaaacacaaggaaaccgcagggtccatgtcaaagctgatgagctatttctgaaactcgtgaagaattgtggtttgtgtggtctatgtcacggcacccttgagggagagtgggcaattgcctgaacttggaggctgtgtcctgtccccaggctgctccagggctgcctccttccgactgggccttcttatctgggactgttgagggcaacaggccttccgaagaccagtgaagaaggaggccctgcaaacaggaggctgacagggtaggaacgaggccatgatccctttgcagaaggacaaccaggaggagggtgtctgccccatctgccaggagagcctgaaggaggccgtgagcaccaactgcggacatctcttctgtcgagtgtgcctgacacagcatgtggagaaggcctcagcctctggggtcttctgctgccccctctgccggaagccctgttctgaggaggtgctagggacaggctatatctgccccaaccaccagaagagggtgtgcaggttctgtgaggagagcagacttcttctatgtgtggaatgcctggtgtcccctgaacacatgtctcatcatgaactgaccattgaaaatgccctcagccactgcaaggaacgactcaatcgccggagcaggaagctcagaaaggacattgcagaacttcagcggctcaaggctcagcaggagaagaaactgcaggctctgcagtttcaggtagaccacgggaaccacaggctggaggctgggccggagagccagcaccaaaccagggaacagctgggtgccctccctcagcagtggctgggccagctggagcacatgccagcagaagcggccagaatccttgacatctccagggcagtaacacagctcagaagcctggtcattgatctggaaaggacggccaaggaattagacaccaacacactgaagaatgctggtgacttactgaacaggagtgctccacagaaattagaggttatttatccccagttggagaaaggagtcagtgaattgcttcttcagccccctcagaagctctgacctgttcatccctgggacacctcacttcaggctcacctcagcctcctctctctccttcctccaacctgtccaggcccccactgggtctacccagtgcatcttcgggcctgccagctcctgaacatgtcaccatttcttcatgtccacagtcatcacctgatgcctgaccctctgactcttggacgatagccagcctccttccaggacaggctcatgcttggggctgccactgtggaggtcggggcccatggtctccaggagcatttgtgaaatctccattttgcctgtaaactgatggtagtgcccatctctcacaatctcattcaaataggatcctccaggcctctgaatggcccaagctcatcagcagtgacaccacctcacatgtggagcccagctgagttcctgcagtacttgttgtctgtaccactcacctggcacttatttattattgttgtggaagacagactcaaagacagcctcccttcgtgatcctcacctcttggaattcatgcccttgtttggtcccctccccttgagtgtaagtgggatctgtgacttgcttctaatgaatggaataaggcaaaggtgatagggtgtcactctggcaactgtgttgcattgtatagaactcctccttgctggcccacccttttagagcccctcctaggagccaagagcagcttccagccaacaacaagcagaggccctcagtcttgtggctgcaagaacctgaattctgccaacaacccgagtgagcttggaagcagattcttccccaactgagccggataagaacctagtccagccaacaccttgattatagtcttgtgagtacctaagctgaggacccagtgaagctgtgccaaaatttcccacccacagaaacagtgtgacaataaatgtgtgtgtgtttttttgtt

SEQ ID NO: 344802 - protein, 351 aa, Artificial Sequence
  derived and/or modified sequence
MVLSQDGSVQSGFLAEGHLDGQPFLRYDRQKRRAKPQGQWAEDVLGAKTWDTETEDLTENGQDLRRTLTHIKDQKGGLHSLQEIRVCEIHEDSSTRGSRHFYYDGELFLSQNLETQESTVPQSSRAQTLAMNVTNFWKEDAMKTKTHYRAMQADCLQKLQRYLKSGVAIRRTVPPMVNVICSEVSEGNITVTCRASSFYPRNITLTWRQDGVSLSHNTQQWGDVLPDGNGTYQTWVATRIRQGEEQRFTCYMEHSGNHGTHPVPSGKALVLQSQRTDFPYVSAAMPCFVIIIILCVPCCKKKTSAAEGPELVSLQVLDQHPVGTGDHRDAAQLGFQPLMSATGSTGSTEGT

SEQ ID NO: 344803 - DNA, 1056 bp, Artificial Sequence
  derived and/or modified sequence
atggtgctcagccaggatggcagcgtgcaatccgggttcctggccgaaggccatttggatggccaacctttcctgcgttatgatcgccagaaacgccgggccaagccccagggccaatgggccgaggacgtactcggggccaaaacatgggacacagagacagaagatctgacagagaacggccaggacctccgtcgaacactaacccacattaaggatcagaagggaggcctgcactccctgcaggaaattcgtgtctgtgagatccatgaggattcatccacccggggctccagacatttctattacgatggtgaactcttcctgtcccagaacctagagacccaagaaagtaccgtcccgcaatccagtagggcacagactttggccatgaatgtgactaacttctggaaggaagacgcgatgaagaccaaaactcattaccgcgcaatgcaggccgattgcctccagaaactgcagagatacctgaaatcgggcgtcgccatcaggagaactgtgccgccgatggttaacgtcatatgctctgaagtgtctgagggcaatattactgtcacatgcagggcttcttccttctaccctagaaatattacactgacatggcggcaggatggcgtgagtctttcacacaatacccagcagtggggtgacgtccttcccgatggcaacggcacctaccagacgtgggtcgccaccagaatcaggcaaggagaggagcagagattcacctgctacatggagcatagtggaaaccacggcacgcatccggtaccctcagggaaggccctcgttcttcagagccagaggacagactttccgtacgtgtccgccgccatgccctgtttcgtcataattattattctgtgtgtgccttgttgtaaaaagaaaactagcgcggccgaggggccagaactggtgtctctccaggtcttagatcagcaccccgtcggcacaggagaccacagagacgctgcacaactcggattccagcctctgatgtctgcaacgggctccacaggctctacagagggcacctag

SEQ ID NO: 344804 - DNA, 1056 bp, Artificial Sequence
  derived and/or modified sequence
atggtgctgagccaggacggctctgtgcagagcggcttcctggccgagggccacctggatggccagcccttcctgcgctatgaccggcagaagaggcgggccaagccccagggccagtgggccgaggatgtgctgggcgccaagacctgggacacagaaacagaggacctgacagaaaatggccaggacctgcggaggaccctgacccacatcaaggaccagaagggcggcctgcacagcctgcaggagatccgggtgtgtgagatccacgaggacagcagcacccggggcagccgccacttctactatgatggagagctgttcctgagccagaacctggagacccaggagagcacagtgccccagagcagccgggcccagaccctggccatgaatgtgaccaacttctggaaggaggatgccatgaagaccaagacccactaccgggccatgcaggccgactgcctgcagaagctgcagcgctacctgaagtctggagtggccatccggaggacagtgccccccatggtgaatgtcatctgcagcgaggtgtctgagggcaacatcaccgtgacctgccgggccagcagcttctaccccaggaacatcaccctgacctggaggcaggatggagtgtccctgagccacaacacccagcagtggggagatgtgctgcctgatggaaatggcacctaccagacctgggtggccacccgcatccggcagggcgaggagcagcgcttcacctgctacatggagcacagcggcaaccacggcacccaccctgtgcccagcggcaaggccctggtgctgcagagccagaggacagacttcccctacgtgtctgctgccatgccctgcttcgtcatcatcatcatcctgtgtgtgccctgctgcaagaagaagaccagcgctgctgagggccctgagctggtgtccctgcaggtgctggaccagcaccctgtgggcaccggggaccacagagatgctgcccagctgggcttccagcccctgatgtctgccaccggcagcacaggcagcacagagggcacctag

SEQ ID NO: 344805 - DNA, 1056 bp, Artificial Sequence
  derived and/or modified sequence
atggtgctgagccaggacggcagcgtgcagagcggcttcctggccgaggggcatctggatggccagcctttcctgcgctatgaccgacagaagcggcgagccaaacctcagggtcagtgggcggaggatgtgctcggagccaaaacctgggacaccgaaacggaagatctcaccgagaacggccaggatctgcgccgaacgctaacccacattaaggaccagaaagggggattacatagtctgcaggagatccgcgtgtgcgaaatacatgaggactcctccacaagaggaagtagacacttctactatgacggcgagttatttctgagccagaatctcgaaacccaggagagtaccgtcccacagtcttctagagcccagactctcgctatgaatgtgacaaacttttggaaagaggatgctatgaaaaccaagacacattacagggccatgcaggccgactgtctacaaaagctgcagagatacctgaagagcggagtggctataagacgaacagtcccacccatggtcaatgtgatatgcagcgaggtgagcgaaggtaatatcacagtgacctgccgcgcatccagcttttacccaaggaacatcactctaacttggcgacaagatggggtttcccttagccataacactcagcaatggggcgacgtgctgcccgacggcaatggcacctatcaaacatgggtagctacacggattagacagggcgaggaacaacggtttacatgctatatggaacattctggaaaccacggcacccacccagtcccaagcggcaaagccctggtgcttcaatcccagcggaccgatttcccttatgtgtctgcggccatgccttgcttcgtgatcattattattctgtgtgtgccctgctgcaaaaagaagacttccgcagcagagggtcccgagctggtctcactgcaggttttggaccaacatcccgtcggtactggagatcatcgggatgcggctcaattgggcttccagccccttatgagtgccacaggctccaccgggtcaaccgagggtacctag

SEQ ID NO: 344806 - DNA, 1056 bp, Artificial Sequence
  derived and/or modified sequence
atggtattgtctcaggacggatccgtacagtctggctttctagccgaggggcacctggacggacagcctttcctgcggtatgaccgccaaaaaagacgggctaagcctcagggccaatgggcagaggacgtgttaggagccaagacgtgggacacagaaactgaggatcttacagagaacggacaggacttgcggaggaccctgacgcacattaaagatcagaaggggggactgcactccctgcaggaaattcgggtctgtgagatccacgaagacagttcgacacgagggtctcgtcatttctattacgacggagaattgttcttgtcacagaacctggaaactcaggagagtaccgtcccccaatccagccgtgctcagactctggccatgaacgtgactaatttctggaaagaggatgctatgaaaacaaaaacgcattatagagcgatgcaagctgactgtctgcagaagctgcagcggtacctcaagtcaggggtggcaattcgtaggaccgtgcctccaatggtgaacgtcatttgctccgaagtgagcgagggaaatatcacagtgacctgtcgggcatcgagtttttatcccagaaatattacactgacttggcgccaggatggagtgagtcttagccataacactcagcaatggggagacgttctgccggatgggaatggtacttatcaaacctgggttgcaaccagaataagacagggtgaggaacagcgtttcacctgctacatggagcacagtggcaaccacggaacacatcctgtgccttccggaaaggctctcgtgcttcagtcccagcgaacggatttcccctatgtttctgccgcaatgccttgttttgtcatcattatcatactctgtgtgccttgctgtaagaagaaaacgagcgcagcagaggggccagaactagtatcccttcaggttctcgatcaacaccccgtgggaactggggatcaccgcgacgctgcgcagctcggatttcagcctctgatgtccgcaacaggctccacaggtagcacagaggggacttag

SEQ ID NO: 344807 - DNA, 1056 bp, Artificial Sequence
  derived and/or modified sequence
atggtgctgagccaggacggcagcgtgcagagcggcttcctggccgagggccacctggacggccagcccttcctgagatacgacagacagaagagaagagccaagccccagggccagtgggccgaggacgtgctgggcgccaagacctgggacaccgagaccgaggacctgaccgagaacggccaggacctgagaagaaccctgacccacatcaaggaccagaagggcggcctgcacagcctgcaggagatcagagtgtgcgagatccacgaggacagcagcaccagaggcagcagacacttctactacgacggcgagctgttcctgagccagaacctggagacccaggagagcaccgtgccccagagcagcagagcccagaccctggccatgaacgtgaccaacttctggaaggaggacgccatgaagaccaagacccactacagagccatgcaggccgactgcctgcagaagctgcagagatacctgaagagcggcgtggccatcagaagaaccgtgccccccatggtgaacgtgatctgcagcgaggtgagcgagggcaacatcaccgtgacctgcagagccagcagcttctaccccagaaacatcaccctgacctggagacaggacggcgtgagcctgagccacaacacccagcagtggggcgacgtgctgcccgacggcaacggcacctaccagacctgggtggccaccagaatcagacagggcgaggagcagagattcacctgctacatggagcacagcggcaaccacggcacccaccccgtgcccagcggcaaggccctggtgctgcagagccagagaaccgacttcccctacgtgagcgccgccatgccctgcttcgtgatcatcatcatcctgtgcgtgccctgctgcaagaagaagaccagcgccgccgagggccccgagctggtgagcctgcaggtgctggaccagcaccccgtgggcaccggcgaccacagagacgccgcccagctgggcttccagcccctgatgagcgccaccggcagcaccggcagcaccgagggcacctag

SEQ ID NO: 344808 - protein, 349 aa, Artificial Sequence
  derived and/or modified sequence
METPPVNTIGEKDTSQPQQEWEKNLRENLDSVIQIRQQPRDPPTETLELEVSPDPASQILEHTQGAEKLVAELEGDSHKSHGSTSQMPETLQASDLWYCPDGSFVKKIVIRGHGLDKPKLGSCCRVLALGFPFGSGPPEGWTELTMGVGPWREETWGELIEKCLESMCQGEEAELQLPGHSGPPVRLTLASFTQGRDSWELETSEKEALAREERARGTELFRAGNPEGAARCYGRALRLLLTLPPPGPPERTVLHANLAACQLLLGQPQLAAQSCDRVLEREPGHLKALYRRGVAQAALGNLEKATADLKKVLAIDPKNRAAQEELGKVVIQGKNQDAGLAQGLRKMFG

SEQ ID NO: 344809 - DNA, 1050 bp, Artificial Sequence
  derived and/or modified sequence
atggagaccccccccgtgaacaccatcggcgagaaggacaccagccagccccagcaggagtgggagaagaacctgagagagaacctggacagcgtgatccagatcagacagcagcccagagacccccccaccgagaccctggagctggaggtgagccccgaccccgccagccagatcctggagcacacccagggcgccgagaagctggtggccgagctggagggcgacagccacaagagccacggcagcaccagccagatgcccgagaccctgcaggccagcgacctgtggtactgccccgacggcagcttcgtgaagaagatcgtgatcagaggccacggcctggacaagcccaagctgggcagctgctgcagagtgctggccctgggcttccccttcggcagcggcccccccgagggctggaccgagctgaccatgggcgtgggcccctggagagaggagacctggggcgagctgatcgagaagtgcctggagagcatgtgccagggcgaggaggccgagctgcagctgcccggccacagcggcccccccgtgagactgaccctggccagcttcacccagggcagagacagctgggagctggagaccagcgagaaggaggccctggccagagaggagagagccagaggcaccgagctgttcagagccggcaaccccgagggcgccgccagatgctacggcagagccctgagactgctgctgaccctgcccccccccggcccccccgagagaaccgtgctgcacgccaacctggccgcctgccagctgctgctgggccagccccagctggccgcccagagctgcgacagagtgctggagagagagcccggccacctgaaggccctgtacagaagaggcgtggcccaggccgccctgggcaacctggagaaggccaccgccgacctgaagaaggtgctggccatcgaccccaagaacagagccgcccaggaggagctgggcaaggtggtgatccagggcaagaaccaggacgccggcctggcccagggcctgagaaagatgttcggctag

SEQ ID NO: 344810 - DNA, 1050 bp, Artificial Sequence
  derived and/or modified sequence
atggagacacccccggtaaacaccatcggggagaaggatacctctcagcctcagcaggagtgggaaaagaacctgcgggaaaacctcgactctgtaatccaaatcagacagcagcctcgtgatccccctaccgaaacattagagttggaggtaagtcccgatccagcttcccaaatcttggagcacacacaaggggctgagaagctggtagctgaactggagggagactcacacaaaagtcatggcagtacctcgcagatgcccgaaactctccaggctagcgatctttggtactgccctgacggctccttcgtgaagaagatcgtcatacgcggacacggacttgacaagcctaagcttggatcttgttgccgggtcctggcattgggctttccctttggctccggacctcctgaggggtggacagaacttacgatgggtgttggcccatggagggaagaaacttggggcgagctcatcgaaaaatgtctggaatctatgtgccagggggaggaagctgagctccagctgcccggtcactctggcccgccagtacgacttaccttagcttctttcactcaggggagagattcctgggaacttgaaaccagcgagaaggaggcacttgcgagggaagagcgggcaagaggaaccgagctgttcagggcagggaaccccgaaggcgctgcccgctgttacggaagagccctgcgattactcttaactctcccaccaccgggaccaccagagcgaactgtccttcacgcgaacctcgcagcttgccagcttctcctcggacagccacagttggccgctcagtcttgtgatcgcgtcttagaaagggaacccggccacctcaaagccctgtacagacgtggggtagctcaggctgccctgggcaatctggaaaaagcgaccgcggacctaaaaaaagtgctagctattgacccaaagaatagagccgctcaagaggagttaggcaaggtggttatccagggcaagaaccaagatgcaggtctggctcagggactccgtaaaatgttcgggtag

SEQ ID NO: 344811 - DNA, 1345 bp, Artificial Sequence
  derived and/or modified sequence
agggttagttgtcagtatctttcccagttgttccgccccctacccccgcctcccgcaccgcgcccctctccggctgccctctccgtgtggggcaaggctccgagggcagcattcagtagccatttagctttggaaggagaggtgattcgaatggcccggctcctcctgtcaccatgctaggcactttggccgcgcaggtgctgacctgaacctggttcatccctttctgaccaaaactgttcactcaccgtggaagggactaagcatccatatggagacgccaccagtcaatacaattggagaaaaggacacctctcagccgcaacaagagtgggaaaagaaccttcgggagaaccttgattcagttattcagattaggcagcagccccgagaccctcctaccgaaacgcttgagctggaagtaagcccagatccagccagccaaattctagagcatactcaaggagctgaaaaactggttgctgaacttgaaggagactctcataagtctcatggatcaaccagtcagatgccagagacccttcaagcttctgatctctggtactgccccgatgggagctttgtcaagaagatcgtaatccgtggccatggcttggacaaacccaaactaggctcctgctgccgggtactggctttggggtttcctttcggatcagggccgccagagggctggacagagctaactatgggcgtagggccatggagggaggaaacttggggggagctcatagagaaatgcttggagtccatgtgtcaaggtgaggaagcagagcttcagctgcctgggcactctggacctcctgtcaggctcacactggcatccttcactcaaggccgagactcctgggagctggagactagcgagaaggaagccctggccagggaagaacgtgcaaggggcacagaactatttcgagctgggaaccctgaaggagctgcccgatgctatggacgggctcttcggctgctcctgactttacccccacctggccctccagaacgaactgtccttcatgccaatctggctgcctgtcagttgttgctagggcagcctcagttggcagcccagagctgtgaccgggtgttggagcgggagcctggccatttaaaggccttataccgaaggggggttgcccaggctgcccttgggaacctggaaaaagcaactgctgacctcaagaaggtgctggcgatagatcccaaaaaccgggcagcccaggaggaactggggaaggtggtcattcaggggaagaaccaggatgcagggctggctcagggtctgcgcaagatgtttggctgattaaaagttaaaccttaaaagaga

SEQ ID NO: 344812 - DNA, 1050 bp, Artificial Sequence
  derived and/or modified sequence
atggagaccccacctgtgaacaccatcggggagaaggacaccagccagccccagcaggagtgggagaagaacctgcgggagaacctggacagcgtcatccagatccggcagcagccccgggaccccccaacagagaccctggagctggaggtgtccccagaccctgccagccagatcctggagcacacccagggcgctgagaagctggtggccgagctggagggggacagccacaagagccacggcagcaccagccagatgcctgagaccctgcaggccagtgacctgtggtactgcccagatggcagctttgtgaagaagatcgtcatccggggccacggcctggacaagcccaagctgggcagctgctgccgggtgctggccctgggcttcccctttggaagtggccccccagagggctggacagagctgaccatgggcgtgggcccctggagggaggagacctggggcgagctgattgagaagtgcctggagagcatgtgccagggcgaggaggccgagctgcagctgcccggccacagcggcccccctgtgcggctgaccctggccagcttcacccagggccgggacagctgggagctggagaccagcgagaaggaggccctggcccgggaggagcgggcccggggcacagagctgttccgggccggcaaccctgagggcgccgcccgctgctacggccgggccctgcggctgctgctgaccctgcccccacctggccccccagagaggacagtgctgcacgccaacctggccgcctgccagctgctgctgggccagccccagctggccgcccagagctgtgacagagtgctggagcgggagcccggccacctgaaggccctgtacagaagaggagtggcccaggccgccctgggcaacctggagaaggccacagctgacctgaagaaggtgctggccatcgaccccaagaacagagctgcccaggaggagctgggcaaggtggtgatccagggcaagaaccaggatgctggcctggcccagggcctgaggaagatgtttggatag

SEQ ID NO: 344813 - DNA, 1050 bp, Artificial Sequence
  derived and/or modified sequence
atggagaccccccccgtgaacaccatcggcgagaaggacaccagccagccacaacaggaatgggaaaagaacttacgtgaaaatttagattcagtgattcagatcaggcagcagcccagggatcctcctaccgaaacgctggagttagaggtgagcccagaccccgctagccaaatcctggagcacacccagggggcagaaaaactggtagccgagctggagggcgattcacacaaatcccacggctctacctctcagatgcctgaaactctccaagcgtccgatctttggtattgtcctgatggatccttcgtgaagaaaatcgtgatccgcggccacggcctggacaagcctaagttaggcagctgttgcagggtgcttgccctaggctttcctttcggctccggtccacctgagggctggactgaactaacgatgggtgttggcccctggagggaggagacctggggggaactcattgaaaagtgtctcgagtccatgtgtcagggcgaagaggccgagctgcagctgcccggacacagcggaccgcccgtacggcttactcttgctagctttacccaaggccgcgatagctgggagctggagacatctgaaaaagaagcgctggctagggaggaacgcgctcgcgggaccgagctcttcagggcaggaaaccccgagggagcagctaggtgctatgggagagcgctgagactgctgttaaccttgcccccccccggcccccccgaacgaacagtcctccatgccaacctggccgcctgccaactgctgttagggcaaccccagctggctgcccagagttgtgacagagtgctagagagagaacccggacatctgaaagcactgtacagacggggtgtggcccaggcggccctcgggaatctcgagaaggctaccgctgacctgaagaaggtactggcaattgaccctaagaatagggccgcccaggaagaactcggaaaagtggtaatccagggcaaaaaccaagacgccggacttgctcagggtctccggaaaatgttcggctag

SEQ ID NO: 344814 - DNA, 1050 bp, Artificial Sequence
  derived and/or modified sequence
atggagaccccccctgttaatacaatcggcgagaaagacaccagccagccacagcaggaatgggaaaaaaaccttagggaaaatttggattctgtgattcagattcgtcagcaaccgagagatccaccgactgagacgctggaactggaggtctctccggaccctgcctctcagatcctggaacacacgcagggagcagaaaagcttgtggcagaactcgaaggtgatagtcataaatcgcacgggtctacctcccaaatgccggagacgctgcaggcatccgatctgtggtattgccccgacggaagctttgtgaagaaaatagtgattagggggcatggcctggataaacccaagctaggaagctgttgtagggtgctcgcactggggtttcccttcggatcaggaccgccagaaggctggacggagctaacgatgggcgtgggcccatggcgtgaggagacttggggagaactcatagagaagtgtctggagagcatgtgccaaggagaagaggcagaactgcaactgcctggacacagcggtccacccgttcggctgactctggccagtttcacccagggtcgagactcctgggagttggagacatccgagaaggaggctctggctcgggaggaacgcgcacgtgggacggagctatttcgggctggtaaccctgagggggctgctagatgttacggcagagctctcagactgctactgactttgccacccccaggaccccctgaacggacggtcctgcatgccaatctcgcagcctgccagctgctactgggccagcctcaactcgccgctcagagttgcgatcgtgttctggagcgagaaccgggacatctgaaagccctttatcgcaggggggtagcccaggctgccctggggaacctcgaaaaagctaccgcagatctaaagaaggttctggcaatcgaccccaagaatcgggctgctcaggaagagttaggaaaagtcgtgatccagggcaaaaatcaagacgcgggtcttgcccaagggctcaggaagatgtttgggtag

SEQ ID NO: 344815 - protein, 251 aa, Artificial Sequence
  derived and/or modified sequence
MGPEALSSLLLLLLVASGDADMKGHFDPAKCRYALGMQDRTIPDSDISASSSWSDSTAARHSRLESSDGDGAWCPAGSVFPKEEEYLQVDLQRLHLVALVGTQGRHAGGLGKEFSRSYRLRYSRDGRRWMGWKDRWGQEVISGNEDPEGVVLKDLGPPMVARLVRFYPRADRVMSVCLRVELYGCLWRDGLLSYTAPVGQTMYLSEAVYLNDSTYDGHTVGGLQYGGLGQLADGVVGLDDFRKSQELRVWP

SEQ ID NO: 344816 - protein, 267 aa, Artificial Sequence
  derived and/or modified sequence
MGPEALSSLLLLLLVASGDADMKGHFDPAKCRYALGMQDRTIPDSDISASSSWSDSTAARHSRLESSDGDGAWCPAGSVFPKEEEYLQVDLQRLHLVALVGTQGRHAGGLGKEFSRSYRLRYSRDGRRWMGWKDRWGQEVISGNEDPEGVVLKDLGPPMVARLVRFYPRADRVMSVCLRVELYGCLWRDGLLSYTAPVGQTMYLSEAVYLNDSTYDGHTVGGLQYGGLGQLADGVVGLDDFRKSQELRVWPGYDYVGWSNHSFSSGY

SEQ ID NO: 344817 - DNA, 126 bp, Artificial Sequence
  derived and/or modified sequence
atggggccagaggctctgagcagtctcctgctgctcctactcgttgcgtcgggggacgctgacatgaaaggccattttgatcccgctaaatgccgctacgctttgggtatgcaggacagaacatag

SEQ ID NO: 344818 - DNA, 126 bp, Artificial Sequence
  derived and/or modified sequence
atgggccctgaagctctttcctccctgctactgctgttactcgttgcctccggcgacgctgacatgaaaggacactttgacccagccaaatgtaggtacgccctcggaatgcaggatagaacatag

SEQ ID NO: 344819 - DNA, 3949 bp, Artificial Sequence
  derived and/or modified sequence
gtcttcccctcgtgggccctgagcgggactgcagccagccccctggggcgccagctttggaggcccccgacagctgctctcgggagccgcctcccgacacccgagccccgccggcgcctcccgctcccggctcccggctcctggctccctccgcctcccccgcccctcgccccgccgccgaagaggccccgctcccgggtcggacgcctgggtctgccgggaagagcgatgagaggtgtctgaaggtggctattcactgagcgatggggttggacttgaaggaatgccaagagatgctgcccccacccccttaggcccgagggatcaggagctatgggaccagaggccctgtcatctttactgctgctgctcttggtggcaagtggagatgctgacatgaagggacattttgatcctgccaagtgccgctatgccctgggcatgcaggaccggaccatcccagacagtgacatctctgcttccagctcctggtcagattccactgccgcccgccacagcaggttggagagcagtgacggggatggggcctggtgccccgcagggtcggtgtttcccaaggaggaggagtacttgcaggtggatctacaacgactccacctggtggctctggtgggcacccagggacggcatgccgggggcctgggcaaggagttctcccggagctaccggctgcgttactcccgggatggtcgccgctggatgggctggaaggaccgctggggtcaggaggtgatctcaggcaatgaggaccctgagggagtggtgctgaaggaccttgggccccccatggttgcccgactggttcgcttctacccccgggctgaccgggtcatgagtgtctgtctgcgggtagagctctatggctgcctctggagggatggactcctgtcttacaccgcccctgtggggcagacaatgtatttatctgaggccgtgtacctcaacgactccacctatgacggacataccgtgggcggactgcagtatgggggtctgggccagctggcagatggtgtggtggggctggatgactttaggaagagtcaggagctgcgggtctggccaggctatgactatgtgggatggagcaaccacagcttctccagtggctatgtggagatggagtttgagtttgaccggctgagggccttccaggctatgcaggtccactgtaacaacatgcacacgctgggagcccgtctgcctggcggggtggaatgtcgcttccggcgtggccctgccatggcctgggagggggagcccatgcgccacaacctagggggcaacctgggggaccccagagcccgggctgtctcagtgccccttggcggccgtgtggctcgctttctgcagtgccgcttcctctttgcggggccctggttactcttcagcgaaatctccttcatctctgatgtggtgaacaattcctctccggcactgggaggcaccttcccgccagccccctggtggccgcctggcccacctcccaccaacttcagcagcttggagctggagcccagaggccagcagcccgtggccaaggccgaggggagcccgaccgccatcctcatcggctgcctggtggccatcatcctgctcctgctgctcatcattgccctcatgctctggcggctgcactggcgcaggctcctcagcaaggctgaacggagggtgttggaagaggagctgacggttcacctctctgtccctggggacactatcctcatcaacaaccgcccaggtcctagagagccacccccgtaccaggagccccggcctcgtgggaatccgccccactccgctccctgtgtccccaatggctctgcgttgctgctctccaatccagcctaccgcctccttctggccacttacgcccgtccccctcgaggcccgggcccccccacacccgcctgggccaaacccaccaacacccaggcctacagtggggactatatggagcctgagaagccaggcgccccgcttctgcccccacctccccagaacagcgtcccccattatgccgaggctgacattgttaccctgcagggcgtcaccgggggcaacacctatgctgtgcctgcactgcccccaggggcagtcggggatgggccccccagagtggatttccctcgatctcgactccgcttcaaggagaagcttggcgagggccagtttggggaggtgcacctgtgtgaggtcgacagccctcaagatctggtcagtcttgatttcccccttaatgtgcgtaagggacaccctttgctggtagctgtcaagatcttacggccagatgccaccaagaatgccagcttctccttgttctccaggaatgatttcctgaaagaggtgaagatcatgtcgaggctcaaggaccccaacatcattcggctgctgggcgtgtgtgtgcaggacgaccccctctgcatgattactgactacatggagaacggcgacctcaaccagttcctcagtgcccaccagctggaggacaaggcagccgagggggcccctggggacgggcaggctgcgcaggggcccaccatcagctacccaatgctgctgcatgtggcagcccagatcgcctccggcatgcgctatctggccacactcaactttgtacatcgggacctggccacgcggaactgcctagttggggaaaatttcaccatcaaaatcgcagactttggcatgagccggaacctctatgctggggactattaccgtgtgcagggccgggcagtgctgcccatccgctggatggcctgggagtgcatcctcatggggaagttcacgactgcgagtgacgtgtgggcctttggtgtgaccctgtgggaggtgctgatgctctgtagggcccagccctttgggcagctcaccgacgagcaggtcatcgagaacgcgggggagttcttccgggaccagggccggcaggtgtacctgtcccggccgcctgcctgcccgcagggcctatatgagctgatgcttcggtgctggagccgggagtctgagcagcgaccacccttttcccagctgcatcggttcctggcagaggatgcactcaacacggtgtgaatcacacatccagctgcccctccctcagggagtgatccaggggaagccagtgacactaaaacaagaggacacaatggcacctctgcccttcccctcccgacagcccatcacctctaatagaggcagtgagactgcaggtgggctgggcccacccagggagctgatgccccttctccccttcctggacacactctcatgtccccttcctgttcttccttcctagaagcccctgtcgcccacccagctggtcctgtggatgggatcctctccaccctcctctagccatcccttggggaagggtggggagaaatataggatagacactggacatggcccattggagcacctgggccccactggacaacactgattcctggagaggtggctgcgcccccagcttctctctccctgtcacacactggaccccactggctgagaatctgggggtgaggaggacaagaaggagaggaaaatgtttccttgtgcctgctcctgtacttgtcctcagcttgggcttcttcctcctccatcacctgaaacactggacctgggggtagccccgccccagccctcagtcacccccacttcccacctgcagtcttgtagctagaacttctctaagcctatacgtttctgtggagtaaatattgggattggggggaaagagggagcaacggcccatagccttggggttggacatctctagtgtagctgccacattgatttttctataatcacttggggtttgtacatttttggggggagagacacagatttttacactaatatatggacctagcttgaggcaattttaatcccctgcactaggcaggtaataataaaggttgagttttcc

SEQ ID NO: 344820 - DNA, 3949 bp, Artificial Sequence
  derived and/or modified sequence
gtcttcccctcgtgggccctgagcgggactgcagccagccccctggggagccagctttggaggcccccgacagctgctctcgggagccgcctcccgacacccgagccccgccggcgcctcccgctcccggctcccggctcctggctccctccgcctcccccgcccctcgccccgccgccgaagaggccccgctcccgggtcggacgcctgggtctgccgggaagagcgatgagaggtgtctgaaggtggctattcactgagcgatggggttggacttgaaggaatgccaagagatgctgcccccacccccttaggcccgagggatcaggagctatgggaccagaggccctgtcatctttactgctgctgctcttggtggcaagtggagatgctgacatgaagggacattttgatcctgccaagtgccgctatgccctgggcatgcaggaccggaccatcccagacagtgacatctctgcttccagctcctggtcagattccactgccgcccgccacagcaggttggagagcagtgacggggatggggcctggtgccccgcagggtcggtgtttcccaaggaggaggagtacttgcaggtggatctacaacgactgcacctggtggctctggtgggcacccagggacggcatgccgggggcctgggcaaggagttctcccggagctaccggctgcgttactcccgggatggtcgccgctggatgggctggaaggaccgctggggtcaggaggtgatctcaggcaatgaggaccctgagggagtggtgctgaaggaccttgggccccccatggttgcccgactggttcgcttctacccccgggctgaccgggtcatgagcgtctgtctgcgggtagagctctatggctgcctctggagggatggactcctgtcttacaccgcccctgtggggcagacaatgtatttatctgaggccgtgtacctcaacgactccacctatgacggacataccgtgggcggactgcagtatgggggtctgggccagctggcagatggtgtggtggggctggatgactttaggaagagtcaggagctgcgggtctggccaggctatgactatgtgggatggagcaaccacagcttctccagtggctatgtggagatggagtttgagtttgaccggctgagggccttccaggctatgcaggtccactgtaacaacatgcacacgctgggagcccgtctgcctggcggggtggaatgtcgcttccggcgtggccctgccatggcctgggagggggagcccatgcgccacaacctagggggcaacctgggggaccccagagcccgggctgtctcagtgccccttggcggccgtgtggctcgctttctgcagtgccgcttcctctttgcggggccctggttactcttcagcgaaatctccttcatctctgatgtggtgaacaattcctctccggcactgggaggcaccttcccgccagccccctggtggccgcctggcccacctcccaccaacttcagcagcttggagctggagcccagaggccagcagcccgtggccaaggccgaggggagcccgaccgccatcctcatcggctgcctggtggccatcatcctgctcctgctgctcatcattgccctcatgctctggcggctgcactggcgcaggctcctcagcaaggctgaacggagggtgttggaagaggagctgacggttcacctctctgtccctggggacactatcctcatcaacaaccgcccaggtcctagagagccacccccgtaccaggagccccggcctcgtgggaatccgccccactctgctccctgtgtccccaatggctctgcgttgctgctctccaatccagcctaccgcctccttctggccacttacgcccgtccccctcgaggcccgggcccccccacacccgcctgggccaaacccaccaacacccaggcctacagtggggactatatggagcctgagaagccaggcgccccgcttctgcccccacctccccagaacagcgtcccccattatgccgaggctgacattgttaccctgcagggcgtcaccgggggcaacacctatgctgtgcctgcactgcccccaggggcagtcggggatgggccccccagagtggatttccctcgatctcgactccgcttcaaggagaagcttggcgagggccagtttggggaggtgcacctgtgtgaggtcgacagccctcaagatctggtcagtcttgatttcccccttaatgtgcgtaagggacaccctttgctggtagctgtcaagatcttacggccagatgccaccaagaatgccagcttctccttgttctccaggaatgatttcctgaaagaggtgaagatcatgtcgaggctcaaggacccaaacatcattcggctgctgggcgtgtgtgtgcaggacgaccccctctgcatgattactgactacatggagaacggcgacctcaaccagttcctcagtgcccaccagctggaggacaaggcagccgagggggcccctggggacgggcaggctgcgcaggggcccaccatcagctacccaatgctgctgcatgtggcagcccagatcgcctccggcatgcgctatctggccacactcaactttgtacatcgggacctggccacgcggaactgcctagttggggaaaatttcaccatcaaaatcgcagactttggcatgagccggaacctctatgctggggactattaccgtgtgcagggccgggcagtgctgcccatccgctggatggcctgggagtgcatcctcatggggaagttcacgactgcgagtgacgtgtgggcctttggtgtgaccctgtgggaggtgctgatgctctgtagggcccagccctttgggcagctcaccgacgagcaggtcatcgagaacgcgggggagttcttccgggaccagggccggcaggtgtacctgtcccggccgcctgcctgcccgcagggcctatatgagctgatgcttcggtgctggagccgggagtctgagcagcgaccacccttttcccagctgcatcggttcctggcagaggatgcactcaacacggtgtgaatcacacatccagctgcccctccctcagggagcgatccaggggaagccagtgacactaaaacaagaggacacaatggcacctctgcccttcccctcccgacagcccatcacctctaatagaggcagtgagactgcaggtgggctgggcccacccagggagctgatgccccttctccccttcctggacacactctcatgtccccttcctgttcttccttcctagaagcccctgtcgcccacccagctggtcctgtggatgggatcctctccaccctcctctagccatcccttggggaagggtggggagaaatataggatagacactggacatggcccattggagcacctgggccccactggacaacactgattcctggagaggtggctgcgcccccagcttctctctccctgtcacacactggaccccactggctgagaatctgggggtgaggaagacaagaaggagaggaaaatgtttccttgtgcctgctcctgtacttgtcctcagcttgggcttcttcctcctccatcacctgaaacactggacctgggggtagccccgccccagccctcagtcacccccacttcccacttgcagtcttgtagctagaacttctctaagcctatacgtttctgtggagtaaatattgggattggggggaaagagggagcaacggcccatagccttggggttggacatctctagtgtagctgccacattgatttttctataatcacttggggtttgtacatttttggggggagagacacagatttttacactaatatatggacctagcttgaggcaattttaatcccctgcactaggcaggtaataataaaggttgagttttcc

SEQ ID NO: 344821 - DNA, 126 bp, Artificial Sequence
  derived and/or modified sequence
atgggccccgaggccctgagcagcctgctgctgctgctgctggtggccagcggcgacgccgacatgaagggccacttcgaccccgccaagtgcagatacgccctgggcatgcaggacagaacctag

SEQ ID NO: 344822 - DNA, 126 bp, Artificial Sequence
  derived and/or modified sequence
atgggtccggaggccctaagttccttgctacttttgctcctggtcgcctccggcgatgcagacatgaaaggccattttgatcccgctaagtgcagatatgcactggggatgcaggaccggacttag

SEQ ID NO: 344823 - DNA, 126 bp, Artificial Sequence
  derived and/or modified sequence
atgggccctgaggccctgagcagcctgctgctgctgctgctggtggccagcggagatgctgacatgaagggccactttgatcctgccaagtgccgctatgccctgggcatgcaggacagaacatag

SEQ ID NO: 344824 - DNA, 3949 bp, Artificial Sequence
  derived and/or modified sequence
gtcttcccctcgtgggccctgagcgggactgcagccagccccctggggcgccagctttggaggcccccgacagctgctctcgggagccgcctcccgacacccgagccccgccggcgcctcccgctcccggctcccggctcctggctccctccgcctcccccgcccctcgccccgccgccgaagaggccccgctcccgggtcggacgcctgggtctgccgggaagagcgatgagaggtgtctgaaggtggctattcactgagcgatggggttggacttgaaggaatgccaagagatgctgcccccacccccttaggcccgagggatcaggagctatgggaccagaggccctgtcatctttactgctgctgctcttggtggcaagtggagatgctgacatgaagggacattttgatcctgccaagtgccgctatgccctgggcatgcaggaccggaccatcccagacagtgacatctctgcttccagctcctggtcagattccactgccgcccgccacagcaggttggagagcagtgacggggatggggcctggtgccccgcagggtcggtgtttcccaaggaggaggagtacttgcaggtggatctacaacgactgcacctggtggctctggtgggcacccagggacggcatgccgggggcctgggcaaggagttctcccggagctaccggctgcgttactcccgggatggtcgccgctggatgggctggaaggaccgctggggtcaggaggtgatctcaggcaatgaggaccctgagggagtggtgctgaaggaccttgggccccccatggttgcccgactggttcgcttctacccccgggctgaccgggtcatgagcgtctgtctgcgggtagagctctatggctgcctctggagggatggactcctgtcttacaccgcccctgtggggcagacaatgtatttatctgaggccgtgtacctcaacgactccacctatgacggacataccgtgggcggactgcagtatgggggtctgggccagctggcagatggtgtggtggggctggatgactttaggaagagtcaggagctgcgggtctggccaggctatgactatgtgggatggagcaaccacagcttctccagtggctatgtggagatggagtttgagtttgaccggctgagggccttccaggctatgcaggtccactgtaacaacatgcacacgctgggagcccgtctgcctggcggggtggaatgtcgcttccggcgtggccctgccatggcctgggagggggagcccatgcgccacaacctagggggcaacctgggggaccccagagcccgggctgtctcagtgccccttggcggccgtgtggctcgctttctgcagtgccgcttcctctttgcggggccctggttactcttcagcgaaatctccttcatctctgatgtggtgaacaattcctctccggcactgggaggcaccttcccgccagccccctggtggccgcctggcccacctcccaccaacttcagcagcttggagctggagcccagaggccagcagcccgtggccaaggccgaggggagcccgaccgccatcctcatcggctgcctggtggccatcatcctgctcctgctgctcatcattgccctcatgctctggcggctgcactggcgcaggctcctcagcaaggctgaacggagggtgttggaagaggagctgacggttcacctctctgtccctggggacactatcctcatcaacaaccgcccaggtcctagagagccacccccgtaccaggagccccggcctcgtgggaatccgccccactccgctccctgtgtccccaatggctctgcgttgctgctctccaatccagcctaccgcctccttctggccacttacgcccgtccccctcgaggcccgggcccccccacacccgcctgggccaaacccaccaacacccaggcctacagtggggactatatggagcctgagaagccaggcgccccgcttctgcccccacctccccagaacagcgtcccccattatgccgaggctgacattgttaccctgcagggcgtcaccgggggcaacacctatgctgtgcctgcactgcccccaggggcagtcggggatgggccccccagagtggatttccctcgatctcgactccgcttcaaggagaagcttggcgagggccagtttggggaggtgcacctgtgtgaggtcgacagccctcaagatctggttagtcttgatttcccccttaatgtgcgtaagggacaccctttgctggtagctgtcaagatcttacggccagatgccaccaagaatgccagcttctccttgttctccaggaatgatttcctgaaagaggtgaagatcatgtcgaggctcaaggacccaaacatcattcggctgctgggcgtgtgtgtgcaggacgaccccctctgcatgattactgactacatggagaacggcgacctcaaccagttcctcagtgcccaccagctggaggacaaggcagccgagggggcccctggggacgggcaggctgcgcaggggcccaccatcagctacccaatgctgctgcatgtggcagcccagatcgcctccggcatgcgctatctggccacactcaactttgtacatcgggacctggccacgcggaactgcctagttggggaaaatttcaccatcaaaatcgcagactttggcatgagccggaacctctatgctggggactattaccgtgtgcagggccgggcagtgctgcccatccgctggatggcctgggagtgcatcctcatggggaagttcacgactgcgagtgacgtgtgggcctttggtgtgaccctgtgggaggtgctgatgctctgtagggcccagccctttgggcagctcaccgacgagcaggtcatcgagaacgcgggggagttcttccgggaccagggccggcaggtgtacctgtcccggccgcctgcctgcccgcagggcctatatgagctgatgcttcggtgctggagccgggagtctgagcagcgaccacccttttcccagctgcatcggttcctggcagaggatgcactcaacacggtgtgaatcacacatccagctgcccctccctcagggagcgatccaggggaagccagtgacactaaaacaagaggacacaatggcacctctgcccttcccctcccgacagcccatcacctctaatagaggcagtgagactgcaggtgggctgggcccacccagggagctgatgccccttctccccttcctggacacactctcatgtccccttcctgttcttccttcctagaagcccctgtcgcccacccagctggtcctgtggatgggatcctctccaccctcctctagccatcccttggggaagggtggggagaaatataggatagacactggacatggcccattggagcacctgggccccactggacaacactgattcctggagaggtggctgcgcccccagcttctctctccctgtcacacactggaccccactggctgagaatctgggggtgaggaggacaagaaggagaggaaaatgtttccttgtgcctgctcctgtacttgtcctcagcttgggcttcttcctcctccatcacctgaaacactggacctgggggtagccccgccccagccctcagtcacccccacttcccacttgcagtcttgtagctagaacttctctaagcctatacgtttctgtggagtaaatattgggattggggggaaagagggagcaacggcccatagccttggggttggacatctctagtgtagctgccacattgatttttctataatcacttggggtttgtacatttttggggggagagacacagatttttacactaatatatggacctagcttgaggcaattttaatcccctgcactaggcaggtaataataaaggttgagttttcc

SEQ ID NO: 344825 - DNA, 126 bp, Artificial Sequence
  derived and/or modified sequence
atgggccccgaggccctgagcagcctgctgctgctgctgctggtggcatctggcgacgcagatatgaaaggacatttcgaccctgccaagtgtcgatacgcgctgggcatgcaggaccgcacgtag

SEQ ID NO: 344826 - RNA, 126 nt, Artificial Sequence
  derived and/or modified sequence
augggcccugaagcucuuuccucccugcuacugcuguuacucguugccuccggcgacgcugacaugaaaggacacuuugacccagccaaauguagguacgcccucggaaugcaggauagaacauag

SEQ ID NO: 344827 - protein, 286 aa, Artificial Sequence
  derived and/or modified sequence
MGPEALSSLLLLLLVASGDADMKGHFDPAKCRYALGMQDRTIPDSDISASSSWSDSTAARHSRLESSDGDGAWCPAGSVFPKEEEYLQVDLQRLHLVALVGTQGRHAGGLGKEFSRSYRLRYSRDGRRWMGWKDRWGQEVISGNEDPEGVVLKDLGPPMVARLVRFYPRADRVMSVCLRVELYGCLWRDGLLSYTAPVGQTMYLSEAVYLNDSTYDGHTVGGLQYGGLGQLADGVVGLDDFRKSQELRVWPGYDYVGWSNHSFSSGYVEMEFEFDRLRAFQAMQVH

SEQ ID NO: 344828 - DNA, 3968 bp, Artificial Sequence
  derived and/or modified sequence
gaggaactgagaggagaaggagaagagagtgggcccgccttcagggtctggggccttccaggttgggtcgtaggggcgggagcgcacaggctgcgagagaggagcaaaggttggtggagggagaagagcagtctggggcctggctggacaggcccccgacagctgctctcgggagccgcctcccgacacccgagccccgccggcgcctcccgctcccggctcccggctcctggctccctccgcctcccccgcccctcgccccgccgccgaagaggccccgctcccgggtcggacgcctgggtctgccgggaagagcgatgagagagatgctgcccccacccccttaggcccgagggatcaggagctatgggaccagaggccctgtcatctttactgctgctgctcttggtggcaagtggagatgctgacatgaagggacattttgatcctgccaagtgccgctatgccctgggcatgcaggaccggaccatcccagacagtgacatctctgcttccagctcctggtcagattccactgccgcccgccacagcaggttggagagcagtgacggggatggggcctggtgccccgcagggtcggtgtttcccaaggaggaggagtacttgcaggtggatctacaacgactgcacctggtggctctggtgggcacccagggacggcatgccgggggcctgggcaaggagttctcccggagctaccggctgcgttactcccgggatggtcgccgctggatgggctggaaggaccgctggggtcaggaggtgatctcaggcaatgaggaccctgagggagtggtgctgaaggaccttgggccccccatggttgcccgactggttcgcttctacccccgggctgaccgggtcatgagcgtctgtctgcgggtagagctctatggctgcctctggagggatggactcctgtcttacaccgcccctgtggggcagacaatgtatttatctgaggccgtgtacctcaacgactccacctatgacggacataccgtgggcggactgcagtatgggggtctgggccagctggcagatggtgtggtggggctggatgactttaggaagagtcaggagctgcgggtctggccaggctatgactatgtgggatggagcaaccacagcttctccagtggctatgtggagatggagtttgagtttgaccggctgagggccttccaggctatgcaggtccactgtaacaacatgcacacgctgggagcccgtctgcctggcggggtggaatgtcgcttccggcgtggccctgccatggcctgggagggggagcccatgcgccacaacctagggggcaacctgggggaccccagagcccgggctgtctcagtgccccttggcggccgtgtggctcgctttctgcagtgccgcttcctctttgcggggccctggttactcttcagcgaaatctccttcatctctgatgtggtgaacaattcctctccggcactgggaggcaccttcccgccagccccctggtggccgcctggcccacctcccaccaacttcagcagcttggagctggagcccagaggccagcagcccgtggccaaggccgaggggagcccgaccgccatcctcatcggctgcctggtggccatcatcctgctcctgctgctcatcattgccctcatgctctggcggctgcactggcgcaggctcctcagcaaggctgaacggagggtgttggaagaggagctgacggttcacctctctgtccctggggacactatcctcatcaacaaccgcccaggtcctagagagccacccccgtaccaggagccccggcctcgtgggaatccgccccactctgctccctgtgtccccaatggctctgcgttgctgctctccaatccagcctaccgcctccttctggccacttacgcccgtccccctcgaggcccgggcccccccacacccgcctgggccaaacccaccaacacccaggcctacagtggggactatatggagcctgagaagccaggcgccccgcttctgcccccacctccccagaacagcgtcccccattatgccgaggctgacattgttaccctgcagggcgtcaccgggggcaacacctatgctgtgcctgcactgcccccaggggcagtcggggatgggccccccagagtggatttccctcgatctcgactccgcttcaaggagaagcttggcgagggccagtttggggaggtgcacctgtgtgaggtcgacagccctcaagatctggtcagtcttgatttcccccttaatgtgcgtaagggacaccctttgctggtagctgtcaagatcttacggccagatgccaccaagaatgccaggaatgatttcctgaaagaggtgaagatcatgtcgaggctcaaggacccaaacatcattcggctgctgggcgtgtgtgtgcaggacgaccccctctgcatgattactgactacatggagaacggcgacctcaaccagttcctcagtgcccaccagctggaggacaaggcagccgagggggcccctggggacgggcaggctgcgcaggggcccaccatcagctacccaatgctgctgcatgtggcagcccagatcgcctccggcatgcgctatctggccacactcaactttgtacatcgggacctggccacgcggaactgcctagttggggaaaatttcaccatcaaaatcgcagactttggcatgagccggaacctctatgctggggactattaccgtgtgcagggccgggcagtgctgcccatccgctggatggcctgggagtgcatcctcatggggaagttcacgactgcgagtgacgtgtgggcctttggtgtgaccctgtgggaggtgctgatgctctgtagggcccagccctttgggcagctcaccgacgagcaggtcatcgagaacgcgggggagttcttccgggaccagggccggcaggtgtacctgtcccggccgcctgcctgcccgcagggcctatatgagctgatgcttcggtgctggagccgggagtctgagcagcgaccacccttttcccagctgcatcggttcctggcagaggatgcactcaacacggtgtgaatcacacatccagctgcccctccctcagggagcgatccaggggaagccagtgacactaaaacaagaggacacaatggcacctctgcccttcccctcccgacagcccatcacctctaatagaggcagtgagactgcaggtgggctgggcccacccagggagctgatgccccttctccccttcctggacacactctcatgtccccttcctgttcttccttcctagaagcccctgtcgcccacccagctggtcctgtggatgggatcctctccaccctcctctagccatcccttggggaagggtggggagaaatataggatagacactggacatggcccattggagcacctgggccccactggacaacactgattcctggagaggtggctgcgcccccagcttctctctccctgtcacacactggaccccactggctgagaatctgggggtgaggaagacaagaaggagaggaaaatgtttccttgtgcctgctcctgtacttgtcctcagcttgggcttcttcctcctccatcacctgaaacactggacctgggggtagccccgccccagccctcagtcacccccacttcccacttgcagtcttgtagctagaacttctctaagcctatacgtttctgtggagtaaatattgggattggggggaaagagggagcaacggcccatagccttggggttggacatctctagtgtagctgccacattgatttttctataatcacttggggtttgtacatttttggggggagagacacagatttttacactaatatatggacctagcttgaggcaattttaatcccctgcactaggcaggtaataataaaggttgagttttccacaa

SEQ ID NO: 344829 - DNA, 3968 bp, Artificial Sequence
  derived and/or modified sequence
gaggaactgagaggagaaggagaagagagtgggcccgccttcagggtctggggccttccaggttgggtcgtaggggcgggagcgcacaggctgcgagagaggagcaaaggttggtggagggagaagagcagtctggggcctggctggacaggcccccgacagctgctctcgggagccgcctcccgacacccgagccccgccggcgcctcccgctcccggctcccggctcctggctccctccgcctcccccgcccctcgccccgccgccgaagaggccccgctcccgggtcggacgcctgggtctgccgggaagagcgatgagagagatgctgcccccacccccttaggcccgagggatcaggagctatgggaccagaggccctgtcatctttactgctgctgctcttggtggcaagtggagatgctgacatgaagggacattttgatcctgccaagtgccgctatgccctgggcatgcaggaccggaccatcccagacagtgacatctctgcttccagctcctggtcagattccactgccgcccgccacagcaggttggagagcagtgacggggatggggcctggtgccccgcagggtcggtgtttcccaaggaggaggagtacttgcaggtggatctacaacgactgcacctggtggctctggtgggcacccagggacggcatgccgggggcctgggcaaggagttctcccggagctaccggctgcgttactcccgggatggtcgccgctggatgggctggaaggaccgctggggtcaggaggtgatctcaggcaatgaggaccctgagggagtggtgctgaaggaccttgggccccccatggttgcccgactggttcgcttctacccccgggctgaccgggtcatgagcgtctgtctgcgggtagagctctatggctgcctctggagggatggactcctgtcttacaccgcccctgtggggcagacaatgtatttatctgaggccgtgtacctcaacgactccacctatgacggacataccgtgggcggactgcagtatgggggtctgggccagctggcagatggtgtggtggggctggatgactttaggaagagtcaggagctgcgggtctggccaggctatgactatgtgggatggagcaaccacagcttctccagtggctatgtggagatggagtttgagtttgaccggctgagggccttccaggctatgcaggtccactgtaacaacatgcacacgctgggagcccgtctgcctggcggggtggaatgtcgcttccggcgtggccctgccatggcctgggagggggagcccatgcgccacaacctagggggcaacctgggggaccccagagcccgggctgtctcagtgccccttggcggccgtgtggctcgctttctgcagtgccgcttcctctttgcggggccctggttactcttcagcgaaatctccttcatctctgatgtggtgaacaattcctctccggcactgggaggcaccttcccgccagccccctggtggccgcctggcccacctcccaccaacttcagcagcttggagctggagcccagaggccagcagcccgtggccaaggccgaggggagcccgaccgccatcctcatcggctgcctggtggccatcatcctgctcctgctgctcatcattgccctcatgctctggcggctgcactggcgcaggctcctcagcaaggctgaacggagggtgttggaagaggagctgacggttcacctctctgtccctggggacactatcctcatcaacaaccgcccaggtcctagagagccacccccgtaccaggagccccggcctcgtgggaatccgccccactccgctccctgtgtccccaatggctctgcgttgctgctctccaatccagcctaccgcctccttctggccacttacgcccgtccccctcgaggcccgggcccccccacacccgcctgggccaaacccaccaacacccaggcctacagtggggactatatggagcctgagaagccaggcgccccgcttctgcccccacctccccagaacagcgtcccccattatgccgaggctgacattgttaccctgcagggcgtcaccgggggcaacacctatgctgtgcctgcactgcccccaggggcagtcggggatgggccccccagagtggatttccctcgatctcgactccgcttcaaggagaagcttggcgagggccagtttggggaggtgcacctgtgtgaggtcgacagccctcaagatctggttagtcttgatttcccccttaatgtgcgtaagggacaccctttgctggtagctgtcaagatcttacggccagatgccaccaagaatgccaggaatgatttcctgaaagaggtgaagatcatgtcgaggctcaaggacccaaacatcattcggctgctgggcgtgtgtgtgcaggacgaccccctctgcatgattactgactacatggagaacggcgacctcaaccagttcctcagtgcccaccagctggaggacaaggcagccgagggggcccctggggacgggcaggctgcgcaggggcccaccatcagctacccaatgctgctgcatgtggcagcccagatcgcctccggcatgcgctatctggccacactcaactttgtacatcgggacctggccacgcggaactgcctagttggggaaaatttcaccatcaaaatcgcagactttggcatgagccggaacctctatgctggggactattaccgtgtgcagggccgggcagtgctgcccatccgctggatggcctgggagtgcatcctcatggggaagttcacgactgcgagtgacgtgtgggcctttggtgtgaccctgtgggaggtgctgatgctctgtagggcccagccctttgggcagctcaccgacgagcaggtcatcgagaacgcgggggagttcttccgggaccagggccggcaggtgtacctgtcccggccgcctgcctgcccgcagggcctatatgagctgatgcttcggtgctggagccgggagtctgagcagcgaccacccttttcccagctgcatcggttcctggcagaggatgcactcaacacggtgtgaatcacacatccagctgcccctccctcagggagcgatccaggggaagccagtgacactaaaacaagaggacacaatggcacctctgcccttcccctcccgacagcccatcacctctaatagaggcagtgagactgcaggtgggctgggcccacccagggagctgatgccccttctccccttcctggacacactctcatgtccccttcctgttcttccttcctagaagcccctgtcgcccacccagctggtcctgtggatgggatcctctccaccctcctctagccatcccttggggaagggtggggagaaatataggatagacactggacatggcccattggagcacctgggccccactggacaacactgattcctggagaggtggctgcgcccccagcttctctctccctgtcacacactggaccccactggctgagaatctgggggtgaggaggacaagaaggagaggaaaatgtttccttgtgcctgctcctgtacttgtcctcagcttgggcttcttcctcctccatcacctgaaacactggacctgggggtagccccgccccagccctcagtcacccccacttcccacttgcagtcttgtagctagaacttctctaagcctatacgtttctgtggagtaaatattgggattggggggaaagagggagcaacggcccatagccttggggttggacatctctagtgtagctgccacattgatttttctataatcacttggggtttgtacatttttggggggagagacacagatttttacactaatatatggacctagcttgaggcaattttaatcccctgcactaggcaggtaataataaaggttgagttttccacaa

SEQ ID NO: 344830 - DNA, 3971 bp, Artificial Sequence
  derived and/or modified sequence
gacgctcggacaaagccaggcagcgttggcagccccagacccgaccccaaaggcctgagactggggtgactgggacctaagagaatcctgagctggaggcccccgacagctgctctcgggagccgcctcccgacacccgagccccgccggcgcctcccgctcccggctcccggctcctggctccctccgcctcccccgcccctcgccccgccgccgaagaggccccgctcccgggtcggacgcctgggtctgccgggaagagcgatgagaggtgtctgaaggtggctattcactgagcgatggggttggacttgaaggaatgccaagagatgctgcccccacccccttaggcccgagggatcaggagctatgggaccagaggccctgtcatctttactgctgctgctcttggtggcaagtggagatgctgacatgaagggacattttgatcctgccaagtgccgctatgccctgggcatgcaggaccggaccatcccagacagtgacatctctgcttccagctcctggtcagattccactgccgcccgccacagcaggttggagagcagtgacggggatggggcctggtgccccgcagggtcggtgtttcccaaggaggaggagtacttgcaggtggatctacaacgactgcacctggtggctctggtgggcacccagggacggcatgccgggggcctgggcaaggagttctcccggagctaccggctgcgttactcccgggatggtcgccgctggatgggctggaaggaccgctggggtcaggaggtgatctcaggcaatgaggaccctgagggagtggtgctgaaggaccttgggccccccatggttgcccgactggttcgcttctacccccgggctgaccgggtcatgagcgtctgtctgcgggtagagctctatggctgcctctggagggatggactcctgtcttacaccgcccctgtggggcagacaatgtatttatctgaggccgtgtacctcaacgactccacctatgacggacataccgtgggcggactgcagtatgggggtctgggccagctggcagatggtgtggtggggctggatgactttaggaagagtcaggagctgcgggtctggccaggctatgactatgtgggatggagcaaccacagcttctccagtggctatgtggagatggagtttgagtttgaccggctgagggccttccaggctatgcaggtccactgtaacaacatgcacacgctgggagcccgtctgcctggcggggtggaatgtcgcttccggcgtggccctgccatggcctgggagggggagcccatgcgccacaacctagggggcaacctgggggaccccagagcccgggctgtctcagtgccccttggcggccgtgtggctcgctttctgcagtgccgcttcctctttgcggggccctggttactcttcagcgaaatctccttcatctctgatgtggtgaacaattcctctccggcactgggaggcaccttcccgccagccccctggtggccgcctggcccacctcccaccaacttcagcagcttggagctggagcccagaggccagcagcccgtggccaaggccgaggggagcccgaccgccatcctcatcggctgcctggtggccatcatcctgctcctgctgctcatcattgccctcatgctctggcggctgcactggcgcaggctcctcagcaaggctgaacggagggtgttggaagaggagctgacggttcacctctctgtccctggggacactatcctcatcaacaaccgcccaggtcctagagagccacccccgtaccaggagccccggcctcgtgggaatccgccccactccgctccctgtgtccccaatggctctgcgttgctgctctccaatccagcctaccgcctccttctggccacttacgcccgtccccctcgaggcccgggcccccccacacccgcctgggccaaacccaccaacacccaggcctacagtggggactatatggagcctgagaagccaggcgccccgcttctgcccccacctccccagaacagcgtcccccattatgccgaggctgacattgttaccctgcagggcgtcaccgggggcaacacctatgctgtgcctgcactgcccccaggggcagtcggggatgggccccccagagtggatttccctcgatctcgactccgcttcaaggagaagcttggcgagggccagtttggggaggtgcacctgtgtgaggtcgacagccctcaagatctggttagtcttgatttcccccttaatgtgcgtaagggacaccctttgctggtagctgtcaagatcttacggccagatgccaccaagaatgccaggaatgatttcctgaaagaggtgaagatcatgtcgaggctcaaggacccaaacatcattcggctgctgggcgtgtgtgtgcaggacgaccccctctgcatgattactgactacatggagaacggcgacctcaaccagttcctcagtgcccaccagctggaggacaaggcagccgagggggcccctggggacgggcaggctgcgcaggggcccaccatcagctacccaatgctgctgcatgtggcagcccagatcgcctccggcatgcgctatctggccacactcaactttgtacatcgggacctggccacgcggaactgcctagttggggaaaatttcaccatcaaaatcgcagactttggcatgagccggaacctctatgctggggactattaccgtgtgcagggccgggcagtgctgcccatccgctggatggcctgggagtgcatcctcatggggaagttcacgactgcgagtgacgtgtgggcctttggtgtgaccctgtgggaggtgctgatgctctgtagggcccagccctttgggcagctcaccgacgagcaggtcatcgagaacgcgggggagttcttccgggaccagggccggcaggtgtacctgtcccggccgcctgcctgcccgcagggcctatatgagctgatgcttcggtgctggagccgggagtctgagcagcgaccacccttttcccagctgcatcggttcctggcagaggatgcactcaacacggtgtgaatcacacatccagctgcccctccctcagggagcgatccaggggaagccagtgacactaaaacaagaggacacaatggcacctctgcccttcccctcccgacagcccatcacctctaatagaggcagtgagactgcaggtgggctgggcccacccagggagctgatgccccttctccccttcctggacacactctcatgtccccttcctgttcttccttcctagaagcccctgtcgcccacccagctggtcctgtggatgggatcctctccaccctcctctagccatcccttggggaagggtggggagaaatataggatagacactggacatggcccattggagcacctgggccccactggacaacactgattcctggagaggtggctgcgcccccagcttctctctccctgtcacacactggaccccactggctgagaatctgggggtgaggaggacaagaaggagaggaaaatgtttccttgtgcctgctcctgtacttgtcctcagcttgggcttcttcctcctccatcacctgaaacactggacctgggggtagccccgccccagccctcagtcacccccacttcccacttgcagtcttgtagctagaacttctctaagcctatacgtttctgtggagtaaatattgggattggggggaaagagggagcaacggcccatagccttggggttggacatctctagtgtagctgccacattgatttttctataatcacttggggtttgtacatttttggggggagagacacagatttttacactaatatatggacctagcttgaggcaattttaatcccctgcactaggcaggtaataataaaggttgagttttccacaa

SEQ ID NO: 344831 - DNA, 3971 bp, Artificial Sequence
  derived and/or modified sequence
gacgctcggacaaagccaggcagcgttggcagccccagacccgaccccaaaggcctgagactggggtgactgggacctaagagaatcctgagctggaggcccccgacagctgctctcgggagccgcctcccgacacccgagccccgccggcgcctcccgctcccggctcccggctcctggctccctccgcctcccccgcccctcgccccgccgccgaagaggccccgctcccgggtcggacgcctgggtctgccgggaagagcgatgagaggtgtctgaaggtggctattcactgagcgatggggttggacttgaaggaatgccaagagatgctgcccccacccccttaggcccgagggatcaggagctatgggaccagaggccctgtcatctttactgctgctgctcttggtggcaagtggagatgctgacatgaagggacattttgatcctgccaagtgccgctatgccctgggcatgcaggaccggaccatcccagacagtgacatctctgcttccagctcctggtcagattccactgccgcccgccacagcaggttggagagcagtgacggggatggggcctggtgccccgcagggtcggtgtttcccaaggaggaggagtacttgcaggtggatctacaacgactccacctggtggctctggtgggcacccagggacggcatgccgggggcctgggcaaggagttctcccggagctaccggctgcgttactcccgggatggtcgccgctggatgggctggaaggaccgctggggtcaggaggtgatctcaggcaatgaggaccctgagggagtggtgctgaaggaccttgggccccccatggttgcccgactggttcgcttctacccccgggctgaccgggtcatgagtgtctgtctgcgggtagagctctatggctgcctctggagggatggactcctgtcttacaccgcccctgtggggcagacaatgtatttatctgaggccgtgtacctcaacgactccacctatgacggacataccgtgggcggactgcagtatgggggtctgggccagctggcagatggtgtggtggggctggatgactttaggaagagtcaggagctgcgggtctggccaggctatgactatgtgggatggagcaaccacagcttctccagtggctatgtggagatggagtttgagtttgaccggctgagggccttccaggctatgcaggtccactgtaacaacatgcacacgctgggagcccgtctgcctggcggggtggaatgtcgcttccggcgtggccctgccatggcctgggagggggagcccatgcgccacaacctagggggcaacctgggggaccccagagcccgggctgtctcagtgccccttggcggccgtgtggctcgctttctgcagtgccgcttcctctttgcggggccctggttactcttcagcgaaatctccttcatctctgatgtggtgaacaattcctctccggcactgggaggcaccttcccgccagccccctggtggccgcctggcccacctcccaccaacttcagcagcttggagctggagcccagaggccagcagcccgtggccaaggccgaggggagcccgaccgccatcctcatcggctgcctggtggccatcatcctgctcctgctgctcatcattgccctcatgctctggcggctgcactggcgcaggctcctcagcaaggctgaacggagggtgttggaagaggagctgacggttcacctctctgtccctggggacactatcctcatcaacaaccgcccaggtcctagagagccacccccgtaccaggagccccggcctcgtgggaatccgccccactccgctccctgtgtccccaatggctctgcgttgctgctctccaatccagcctaccgcctccttctggccacttacgcccgtccccctcgaggcccgggcccccccacacccgcctgggccaaacccaccaacacccaggcctacagtggggactatatggagcctgagaagccaggcgccccgcttctgcccccacctccccagaacagcgtcccccattatgccgaggctgacattgttaccctgcagggcgtcaccgggggcaacacctatgctgtgcctgcactgcccccaggggcagtcggggatgggccccccagagtggatttccctcgatctcgactccgcttcaaggagaagcttggcgagggccagtttggggaggtgcacctgtgtgaggtcgacagccctcaagatctggtcagtcttgatttcccccttaatgtgcgtaagggacaccctttgctggtagctgtcaagatcttacggccagatgccaccaagaatgccaggaatgatttcctgaaagaggtgaagatcatgtcgaggctcaaggaccccaacatcattcggctgctgggcgtgtgtgtgcaggacgaccccctctgcatgattactgactacatggagaacggcgacctcaaccagttcctcagtgcccaccagctggaggacaaggcagccgagggggcccctggggacgggcaggctgcgcaggggcccaccatcagctacccaatgctgctgcatgtggcagcccagatcgcctccggcatgcgctatctggccacactcaactttgtacatcgggacctggccacgcggaactgcctagttggggaaaatttcaccatcaaaatcgcagactttggcatgagccggaacctctatgctggggactattaccgtgtgcagggccgggcagtgctgcccatccgctggatggcctgggagtgcatcctcatggggaagttcacgactgcgagtgacgtgtgggcctttggtgtgaccctgtgggaggtgctgatgctctgtagggcccagccctttgggcagctcaccgacgagcaggtcatcgagaacgcgggggagttcttccgggaccagggccggcaggtgtacctgtcccggccgcctgcctgcccgcagggcctatatgagctgatgcttcggtgctggagccgggagtctgagcagcgaccacccttttcccagctgcatcggttcctggcagaggatgcactcaacacggtgtgaatcacacatccagctgcccctccctcagggagtgatccaggggaagccagtgacactaaaacaagaggacacaatggcacctctgcccttcccctcccgacagcccatcacctctaatagaggcagtgagactgcaggtgggctgggcccacccagggagctgatgccccttctccccttcctggacacactctcatgtccccttcctgttcttccttcctagaagcccctgtcgcccacccagctggtcctgtggatgggatcctctccaccctcctctagccatcccttggggaagggtggggagaaatataggatagacactggacatggcccattggagcacctgggccccactggacaacactgattcctggagaggtggctgcgcccccagcttctctctccctgtcacacactggaccccactggctgagaatctgggggtgaggaggacaagaaggagaggaaaatgtttccttgtgcctgctcctgtacttgtcctcagcttgggcttcttcctcctccatcacctgaaacactggacctgggggtagccccgccccagccctcagtcacccccacttcccacctgcagtcttgtagctagaacttctctaagcctatacgtttctgtggagtaaatattgggattggggggaaagagggagcaacggcccatagccttggggttggacatctctagtgtagctgccacattgatttttctataatcacttggggtttgtacatttttggggggagagacacagatttttacactaatatatggacctagcttgaggcaattttaatcccctgcactaggcaggtaataataaaggttgagttttccacaa

SEQ ID NO: 344832 - DNA, 3968 bp, Artificial Sequence
  derived and/or modified sequence
gaggaactgagaggagaaggagaagagagtgggcccgccttcagggtctggggccttccaggttgggtcgtaggggcgggagcgcacaggctgcgagagaggagcaaaggttggtggagggagaagagcagtctggggcctggctggacaggcccccgacagctgctctcgggagccgcctcccgacacccgagccccgccggcgcctcccgctcccggctcccggctcctggctccctccgcctcccccgcccctcgccccgccgccgaagaggccccgctcccgggtcggacgcctgggtctgccgggaagagcgatgagagagatgctgcccccacccccttaggcccgagggatcaggagctatgggaccagaggccctgtcatctttactgctgctgctcttggtggcaagtggagatgctgacatgaagggacattttgatcctgccaagtgccgctatgccctgggcatgcaggaccggaccatcccagacagtgacatctctgcttccagctcctggtcagattccactgccgcccgccacagcaggttggagagcagtgacggggatggggcctggtgccccgcagggtcggtgtttcccaaggaggaggagtacttgcaggtggatctacaacgactccacctggtggctctggtgggcacccagggacggcatgccgggggcctgggcaaggagttctcccggagctaccggctgcgttactcccgggatggtcgccgctggatgggctggaaggaccgctggggtcaggaggtgatctcaggcaatgaggaccctgagggagtggtgctgaaggaccttgggccccccatggttgcccgactggttcgcttctacccccgggctgaccgggtcatgagtgtctgtctgcgggtagagctctatggctgcctctggagggatggactcctgtcttacaccgcccctgtggggcagacaatgtatttatctgaggccgtgtacctcaacgactccacctatgacggacataccgtgggcggactgcagtatgggggtctgggccagctggcagatggtgtggtggggctggatgactttaggaagagtcaggagctgcgggtctggccaggctatgactatgtgggatggagcaaccacagcttctccagtggctatgtggagatggagtttgagtttgaccggctgagggccttccaggctatgcaggtccactgtaacaacatgcacacgctgggagcccgtctgcctggcggggtggaatgtcgcttccggcgtggccctgccatggcctgggagggggagcccatgcgccacaacctagggggcaacctgggggaccccagagcccgggctgtctcagtgccccttggcggccgtgtggctcgctttctgcagtgccgcttcctctttgcggggccctggttactcttcagcgaaatctccttcatctctgatgtggtgaacaattcctctccggcactgggaggcaccttcccgccagccccctggtggccgcctggcccacctcccaccaacttcagcagcttggagctggagcccagaggccagcagcccgtggccaaggccgaggggagcccgaccgccatcctcatcggctgcctggtggccatcatcctgctcctgctgctcatcattgccctcatgctctggcggctgcactggcgcaggctcctcagcaaggctgaacggagggtgttggaagaggagctgacggttcacctctctgtccctggggacactatcctcatcaacaaccgcccaggtcctagagagccacccccgtaccaggagccccggcctcgtgggaatccgccccactccgctccctgtgtccccaatggctctgcgttgctgctctccaatccagcctaccgcctccttctggccacttacgcccgtccccctcgaggcccgggcccccccacacccgcctgggccaaacccaccaacacccaggcctacagtggggactatatggagcctgagaagccaggcgccccgcttctgcccccacctccccagaacagcgtcccccattatgccgaggctgacattgttaccctgcagggcgtcaccgggggcaacacctatgctgtgcctgcactgcccccaggggcagtcggggatgggccccccagagtggatttccctcgatctcgactccgcttcaaggagaagcttggcgagggccagtttggggaggtgcacctgtgtgaggtcgacagccctcaagatctggtcagtcttgatttcccccttaatgtgcgtaagggacaccctttgctggtagctgtcaagatcttacggccagatgccaccaagaatgccaggaatgatttcctgaaagaggtgaagatcatgtcgaggctcaaggaccccaacatcattcggctgctgggcgtgtgtgtgcaggacgaccccctctgcatgattactgactacatggagaacggcgacctcaaccagttcctcagtgcccaccagctggaggacaaggcagccgagggggcccctggggacgggcaggctgcgcaggggcccaccatcagctacccaatgctgctgcatgtggcagcccagatcgcctccggcatgcgctatctggccacactcaactttgtacatcgggacctggccacgcggaactgcctagttggggaaaatttcaccatcaaaatcgcagactttggcatgagccggaacctctatgctggggactattaccgtgtgcagggccgggcagtgctgcccatccgctggatggcctgggagtgcatcctcatggggaagttcacgactgcgagtgacgtgtgggcctttggtgtgaccctgtgggaggtgctgatgctctgtagggcccagccctttgggcagctcaccgacgagcaggtcatcgagaacgcgggggagttcttccgggaccagggccggcaggtgtacctgtcccggccgcctgcctgcccgcagggcctatatgagctgatgcttcggtgctggagccgggagtctgagcagcgaccacccttttcccagctgcatcggttcctggcagaggatgcactcaacacggtgtgaatcacacatccagctgcccctccctcagggagtgatccaggggaagccagtgacactaaaacaagaggacacaatggcacctctgcccttcccctcccgacagcccatcacctctaatagaggcagtgagactgcaggtgggctgggcccacccagggagctgatgccccttctccccttcctggacacactctcatgtccccttcctgttcttccttcctagaagcccctgtcgcccacccagctggtcctgtggatgggatcctctccaccctcctctagccatcccttggggaagggtggggagaaatataggatagacactggacatggcccattggagcacctgggccccactggacaacactgattcctggagaggtggctgcgcccccagcttctctctccctgtcacacactggaccccactggctgagaatctgggggtgaggaggacaagaaggagaggaaaatgtttccttgtgcctgctcctgtacttgtcctcagcttgggcttcttcctcctccatcacctgaaacactggacctgggggtagccccgccccagccctcagtcacccccacttcccacctgcagtcttgtagctagaacttctctaagcctatacgtttctgtggagtaaatattgggattggggggaaagagggagcaacggcccatagccttggggttggacatctctagtgtagctgccacattgatttttctataatcacttggggtttgtacatttttggggggagagacacagatttttacactaatatatggacctagcttgaggcaattttaatcccctgcactaggcaggtaataataaaggttgagttttccacaa

SEQ ID NO: 344833 - DNA, 3857 bp, Artificial Sequence
  derived and/or modified sequence
tgctctcgggagccgcctcccgacacccgagccccgccggcgcctcccgctcccggctcccggctcctggctccctccgcctcccccgcccctcgccccgccgccgaagaggccccgctcccgggtcggacgcctgggtctgccgggaagagcgatgagaggtgtctgaaggtggctattcactgagcgatggggttggacttgaaggaatgccaagagatgctgcccccacccccttaggcccgagggatcaggagctatgggaccagaggccctgtcatctttactgctgctgctcttggtggcaagtggagatgctgacatgaagggacattttgatcctgccaagtgccgctatgccctgggcatgcaggaccggaccatcccagacagtgacatctctgcttccagctcctggtcagattccactgccgcccgccacagcaggttggagagcagtgacggggatggggcctggtgccccgcagggtcggtgtttcccaaggaggaggagtacttgcaggtggatctacaacgactgcacctggtggctctggtgggcacccagggacggcatgccgggggcctgggcaaggagttctcccggagctaccggctgcgttactcccgggatggtcgccgctggatgggctggaaggaccgctggggtcaggaggtgatctcaggcaatgaggaccctgagggagtggtgctgaaggaccttgggccccccatggttgcccgactggttcgcttctacccccgggctgaccgggtcatgagcgtctgtctgcgggtagagctctatggctgcctctggagggatggactcctgtcttacaccgcccctgtggggcagacaatgtatttatctgaggccgtgtacctcaacgactccacctatgacggacataccgtgggcggactgcagtatgggggtctgggccagctggcagatggtgtggtggggctggatgactttaggaagagtcaggagctgcgggtctggccaggctatgactatgtgggatggagcaaccacagcttctccagtggctatgtggagatggagtttgagtttgaccggctgagggccttccaggctatgcaggtccactgtaacaacatgcacacgctgggagcccgtctgcctggcggggtggaatgtcgcttccggcgtggccctgccatggcctgggagggggagcccatgcgccacaacctagggggcaacctgggggaccccagagcccgggctgtctcagtgccccttggcggccgtgtggctcgctttctgcagtgccgcttcctctttgcggggccctggttactcttcagcgaaatctccttcatctctgatgtggtgaacaattcctctccggcactgggaggcaccttcccgccagccccctggtggccgcctggcccacctcccaccaacttcagcagcttggagctggagcccagaggccagcagcccgtggccaaggccgaggggagcccgaccgccatcctcatcggctgcctggtggccatcatcctgctcctgctgctcatcattgccctcatgctctggcggctgcactggcgcaggctcctcagcaaggctgaacggagggtgttggaagaggagctgacggttcacctctctgtccctggggacactatcctcatcaacaaccgcccaggtcctagagagccacccccgtaccaggagccccggcctcgtgggaatccgccccactccgctccctgtgtccccaatggctctgcgttgctgctctccaatccagcctaccgcctccttctggccacttacgcccgtccccctcgaggcccgggcccccccacacccgcctgggccaaacccaccaacacccaggcctacagtggggactatatggagcctgagaagccaggcgccccgcttctgcccccacctccccagaacagcgtcccccattatgccgaggctgacattgttaccctgcagggcgtcaccgggggcaacacctatgctgtgcctgcactgcccccaggggcagtcggggatgggccccccagagtggatttccctcgatctcgactccgcttcaaggagaagcttggcgagggccagtttggggaggtgcacctgtgtgaggtcgacagccctcaagatctggttagtcttgatttcccccttaatgtgcgtaagggacaccctttgctggtagctgtcaagatcttacggccagatgccaccaagaatgccaggaatgatttcctgaaagaggtgaagatcatgtcgaggctcaaggacccaaacatcattcggctgctgggcgtgtgtgtgcaggacgaccccctctgcatgattactgactacatggagaacggcgacctcaaccagttcctcagtgcccaccagctggaggacaaggcagccgagggggcccctggggacgggcaggctgcgcaggggcccaccatcagctacccaatgctgctgcatgtggcagcccagatcgcctccggcatgcgctatctggccacactcaactttgtacatcgggacctggccacgcggaactgcctagttggggaaaatttcaccatcaaaatcgcagactttggcatgagccggaacctctatgctggggactattaccgtgtgcagggccgggcagtgctgcccatccgctggatggcctgggagtgcatcctcatggggaagttcacgactgcgagtgacgtgtgggcctttggtgtgaccctgtgggaggtgctgatgctctgtagggcccagccctttgggcagctcaccgacgagcaggtcatcgagaacgcgggggagttcttccgggaccagggccggcaggtgtacctgtcccggccgcctgcctgcccgcagggcctatatgagctgatgcttcggtgctggagccgggagtctgagcagcgaccacccttttcccagctgcatcggttcctggcagaggatgcactcaacacggtgtgaatcacacatccagctgcccctccctcagggagcgatccaggggaagccagtgacactaaaacaagaggacacaatggcacctctgcccttcccctcccgacagcccatcacctctaatagaggcagtgagactgcaggtgggctgggcccacccagggagctgatgccccttctccccttcctggacacactctcatgtccccttcctgttcttccttcctagaagcccctgtcgcccacccagctggtcctgtggatgggatcctctccaccctcctctagccatcccttggggaagggtggggagaaatataggatagacactggacatggcccattggagcacctgggccccactggacaacactgattcctggagaggtggctgcgcccccagcttctctctccctgtcacacactggaccccactggctgagaatctgggggtgaggaggacaagaaggagaggaaaatgtttccttgtgcctgctcctgtacttgtcctcagcttgggcttcttcctcctccatcacctgaaacactggacctgggggtagccccgccccagccctcagtcacccccacttcccacttgcagtcttgtagctagaacttctctaagcctatacgtttctgtggagtaaatattgggattggggggaaagagggagcaacggcccatagccttggggttggacatctctagtgtagctgccacattgatttttctataatcacttggggtttgtacatttttggggggagagacacagatttttacactaatatatggacctagcttgaggcaattttaatcccctgcactaggcaggtaataataaaggttgagttttcc

SEQ ID NO: 344834 - DNA, 4148 bp, Artificial Sequence
  derived and/or modified sequence
cctttggttctgtttcacagttctcagcctcccctccctttctccacagccaggctgctcagtccctctctgcgggggcctagaggctcggtgaggggagcgggacttggttgccatggtcacattgaagccagccgcagctggcccgggcagctgctcctcctgggcccggggccccggacgctcggacaaagccaggcagcgttggcagccccagacccgaccccaaaggcctgagactggggtgactgggacctaagagaatcctgagctggaggcccccgacagctgctctcgggagccgcctcccgacacccgagccccgccggcgcctcccgctcccggctcccggctcctggctccctccgcctcccccgcccctcgccccgccgccgaagaggccccgctcccgggtcggacgcctgggtctgccgggaagagcgatgagaggtgtctgaaggtggctattcactgagcgatggggttggacttgaaggaatgccaagagatgctgcccccacccccttaggcccgagggatcaggagctatgggaccagaggccctgtcatctttactgctgctgctcttggtggcaagtggagatgctgacatgaagggacattttgatcctgccaagtgccgctatgccctgggcatgcaggaccggaccatcccagacagtgacatctctgcttccagctcctggtcagattccactgccgcccgccacagcaggttggagagcagtgacggggatggggcctggtgccccgcagggtcggtgtttcccaaggaggaggagtacttgcaggtggatctacaacgactgcacctggtggctctggtgggcacccagggacggcatgccgggggcctgggcaaggagttctcccggagctaccggctgcgttactcccgggatggtcgccgctggatgggctggaaggaccgctggggtcaggaggtgatctcaggcaatgaggaccctgagggagtggtgctgaaggaccttgggccccccatggttgcccgactggttcgcttctacccccgggctgaccgggtcatgagcgtctgtctgcgggtagagctctatggctgcctctggagggatggactcctgtcttacaccgcccctgtggggcagacaatgtatttatctgaggccgtgtacctcaacgactccacctatgacggacataccgtgggcggactgcagtatgggggtctgggccagctggcagatggtgtggtggggctggatgactttaggaagagtcaggagctgcgggtctggccaggctatgactatgtgggatggagcaaccacagcttctccagtggctatgtggagatggagtttgagtttgaccggctgagggccttccaggctatgcaggtccactgtaacaacatgcacacgctgggagcccgtctgcctggcggggtggaatgtcgcttccggcgtggccctgccatggcctgggagggggagcccatgcgccacaacctagggggcaacctgggggaccccagagcccgggctgtctcagtgccccttggcggccgtgtggctcgctttctgcagtgccgcttcctctttgcggggccctggttactcttcagcgaaatctccttcatctctgatgtggtgaacaattcctctccggcactgggaggcaccttcccgccagccccctggtggccgcctggcccacctcccaccaacttcagcagcttggagctggagcccagaggccagcagcccgtggccaaggccgaggggagcccgaccgccatcctcatcggctgcctggtggccatcatcctgctcctgctgctcatcattgccctcatgctctggcggctgcactggcgcaggctcctcagcaaggctgaacggagggtgttggaagaggagctgacggttcacctctctgtccctggggacactatcctcatcaacaaccgcccaggtcctagagagccacccccgtaccaggagccccggcctcgtgggaatccgccccactccgctccctgtgtccccaatggctctgcgttgctgctctccaatccagcctaccgcctccttctggccacttacgcccgtccccctcgaggcccgggcccccccacacccgcctgggccaaacccaccaacacccaggcctacagtggggactatatggagcctgagaagccaggcgccccgcttctgcccccacctccccagaacagcgtcccccattatgccgaggctgacattgttaccctgcagggcgtcaccgggggcaacacctatgctgtgcctgcactgcccccaggggcagtcggggatgggccccccagagtggatttccctcgatctcgactccgcttcaaggagaagcttggcgagggccagtttggggaggtgcacctgtgtgaggtcgacagccctcaagatctggttagtcttgatttcccccttaatgtgcgtaagggacaccctttgctggtagctgtcaagatcttacggccagatgccaccaagaatgccaggaatgatttcctgaaagaggtgaagatcatgtcgaggctcaaggacccaaacatcattcggctgctgggcgtgtgtgtgcaggacgaccccctctgcatgattactgactacatggagaacggcgacctcaaccagttcctcagtgcccaccagctggaggacaaggcagccgagggggcccctggggacgggcaggctgcgcaggggcccaccatcagctacccaatgctgctgcatgtggcagcccagatcgcctccggcatgcgctatctggccacactcaactttgtacatcgggacctggccacgcggaactgcctagttggggaaaatttcaccatcaaaatcgcagactttggcatgagccggaacctctatgctggggactattaccgtgtgcagggccgggcagtgctgcccatccgctggatggcctgggagtgcatcctcatggggaagttcacgactgcgagtgacgtgtgggcctttggtgtgaccctgtgggaggtgctgatgctctgtagggcccagccctttgggcagctcaccgacgagcaggtcatcgagaacgcgggggagttcttccgggaccagggccggcaggtgtacctgtcccggccgcctgcctgcccgcagggcctatatgagctgatgcttcggtgctggagccgggagtctgagcagcgaccacccttttcccagctgcatcggttcctggcagaggatgcactcaacacggtgtgaatcacacatccagctgcccctccctcagggagcgatccaggggaagccagtgacactaaaacaagaggacacaatggcacctctgcccttcccctcccgacagcccatcacctctaatagaggcagtgagactgcaggtgggctgggcccacccagggagctgatgccccttctccccttcctggacacactctcatgtccccttcctgttcttccttcctagaagcccctgtcgcccacccagctggtcctgtggatgggatcctctccaccctcctctagccatcccttggggaagggtggggagaaatataggatagacactggacatggcccattggagcacctgggccccactggacaacactgattcctggagaggtggctgcgcccccagcttctctctccctgtcacacactggaccccactggctgagaatctgggggtgaggaggacaagaaggagaggaaaatgtttccttgtgcctgctcctgtacttgtcctcagcttgggcttcttcctcctccatcacctgaaacactggacctgggggtagccccgccccagccctcagtcacccccacttcccacttgcagtcttgtagctagaacttctctaagcctatacgtttctgtggagtaaatattgggattggggggaaagagggagcaacggcccatagccttggggttggacatctctagtgtagctgccacattgatttttctataatcacttggggtttgtacatttttggggggagagacacagatttttacactaatatatggacctagcttgaggcaattttaatcccctgcactaggcaggtaataataaaggttgagttttccac

SEQ ID NO: 344835 - DNA, 3894 bp, Artificial Sequence
  derived and/or modified sequence
ggaagggagggagccgaggcgagggggaggcggcgcctgggcccgagccgccccagccctggctcctctccccggaacaggcccccgacagctgctctcgggagccgcctcccgacacccgagccccgccggcgcctcccgctcccggctcccggctcctggctccctccgcctcccccgcccctcgccccgccgccgaagaggccccgctcccgggtcggacgcctgggtctgccgggaagagcgatgagagagatgctgcccccacccccttaggcccgagggatcaggagctatgggaccagaggccctgtcatctttactgctgctgctcttggtggcaagtggagatgctgacatgaagggacattttgatcctgccaagtgccgctatgccctgggcatgcaggaccggaccatcccagacagtgacatctctgcttccagctcctggtcagattccactgccgcccgccacagcaggttggagagcagtgacggggatggggcctggtgccccgcagggtcggtgtttcccaaggaggaggagtacttgcaggtggatctacaacgactgcacctggtggctctggtgggcacccagggacggcatgccgggggcctgggcaaggagttctcccggagctaccggctgcgttactcccgggatggtcgccgctggatgggctggaaggaccgctggggtcaggaggtgatctcaggcaatgaggaccctgagggagtggtgctgaaggaccttgggccccccatggttgcccgactggttcgcttctacccccgggctgaccgggtcatgagcgtctgtctgcgggtagagctctatggctgcctctggagggatggactcctgtcttacaccgcccctgtggggcagacaatgtatttatctgaggccgtgtacctcaacgactccacctatgacggacataccgtgggcggactgcagtatgggggtctgggccagctggcagatggtgtggtggggctggatgactttaggaagagtcaggagctgcgggtctggccaggctatgactatgtgggatggagcaaccacagcttctccagtggctatgtggagatggagtttgagtttgaccggctgagggccttccaggctatgcaggtccactgtaacaacatgcacacgctgggagcccgtctgcctggcggggtggaatgtcgcttccggcgtggccctgccatggcctgggagggggagcccatgcgccacaacctagggggcaacctgggggaccccagagcccgggctgtctcagtgccccttggcggccgtgtggctcgctttctgcagtgccgcttcctctttgcggggccctggttactcttcagcgaaatctccttcatctctgatgtggtgaacaattcctctccggcactgggaggcaccttcccgccagccccctggtggccgcctggcccacctcccaccaacttcagcagcttggagctggagcccagaggccagcagcccgtggccaaggccgaggggagcccgaccgccatcctcatcggctgcctggtggccatcatcctgctcctgctgctcatcattgccctcatgctctggcggctgcactggcgcaggctcctcagcaaggctgaacggagggtgttggaagaggagctgacggttcacctctctgtccctggggacactatcctcatcaacaaccgcccaggtcctagagagccacccccgtaccaggagccccggcctcgtgggaatccgccccactccgctccctgtgtccccaatggctctgcgttgctgctctccaatccagcctaccgcctccttctggccacttacgcccgtccccctcgaggcccgggcccccccacacccgcctgggccaaacccaccaacacccaggcctacagtggggactatatggagcctgagaagccaggcgccccgcttctgcccccacctccccagaacagcgtcccccattatgccgaggctgacattgttaccctgcagggcgtcaccgggggcaacacctatgctgtgcctgcactgcccccaggggcagtcggggatgggccccccagagtggatttccctcgatctcgactccgcttcaaggagaagcttggcgagggccagtttggggaggtgcacctgtgtgaggtcgacagccctcaagatctggttagtcttgatttcccccttaatgtgcgtaagggacaccctttgctggtagctgtcaagatcttacggccagatgccaccaagaatgccaggaatgatttcctgaaagaggtgaagatcatgtcgaggctcaaggacccaaacatcattcggctgctgggcgtgtgtgtgcaggacgaccccctctgcatgattactgactacatggagaacggcgacctcaaccagttcctcagtgcccaccagctggaggacaaggcagccgagggggcccctggggacgggcaggctgcgcaggggcccaccatcagctacccaatgctgctgcatgtggcagcccagatcgcctccggcatgcgctatctggccacactcaactttgtacatcgggacctggccacgcggaactgcctagttggggaaaatttcaccatcaaaatcgcagactttggcatgagccggaacctctatgctggggactattaccgtgtgcagggccgggcagtgctgcccatccgctggatggcctgggagtgcatcctcatggggaagttcacgactgcgagtgacgtgtgggcctttggtgtgaccctgtgggaggtgctgatgctctgtagggcccagccctttgggcagctcaccgacgagcaggtcatcgagaacgcgggggagttcttccgggaccagggccggcaggtgtacctgtcccggccgcctgcctgcccgcagggcctatatgagctgatgcttcggtgctggagccgggagtctgagcagcgaccacccttttcccagctgcatcggttcctggcagaggatgcactcaacacggtgtgaatcacacatccagctgcccctccctcagggagcgatccaggggaagccagtgacactaaaacaagaggacacaatggcacctctgcccttcccctcccgacagcccatcacctctaatagaggcagtgagactgcaggtgggctgggcccacccagggagctgatgccccttctccccttcctggacacactctcatgtccccttcctgttcttccttcctagaagcccctgtcgcccacccagctggtcctgtggatgggatcctctccaccctcctctagccatcccttggggaagggtggggagaaatataggatagacactggacatggcccattggagcacctgggccccactggacaacactgattcctggagaggtggctgcgcccccagcttctctctccctgtcacacactggaccccactggctgagaatctgggggtgaggaggacaagaaggagaggaaaatgtttccttgtgcctgctcctgtacttgtcctcagcttgggcttcttcctcctccatcacctgaaacactggacctgggggtagccccgccccagccctcagtcacccccacttcccacttgcagtcttgtagctagaacttctctaagcctatacgtttctgtggagtaaatattgggattggggggaaagagggagcaacggcccatagccttggggttggacatctctagtgtagctgccacattgatttttctataatcacttggggtttgtacatttttggggggagagacacagatttttacactaatatatggacctagcttgaggcaattttaatcccctgcactaggcaggtaataataaaggttgagttttcca

SEQ ID NO: 344836 - DNA, 3971 bp, Artificial Sequence
  derived and/or modified sequence
gacgctcggacaaagccaggcagcgttggcagccccagacccgaccccaaaggcctgagactggggtgactgggacctaagagaatcctgagctggaggcccccgacagctgctctcgggagccgcctcccgacacccgagccccgccggcgcctcccgctcccggctcccggctcctggctccctccgcctcccccgcccctcgccccgccgccgaagaggccccgctcccgggtcggacgcctgggtctgccgggaagagcgatgagaggtgtctgaaggtggctattcactgagcgatggggttggacttgaaggaatgccaagagatgctgcccccacccccttaggcccgagggatcaggagctatgggaccagaggccctgtcatctttactgctgctgctcttggtggcaagtggagatgctgacatgaagggacattttgatcctgccaagtgccgctatgccctgggcatgcaggaccggaccatcccagacagtgacatctctgcttccagctcctggtcagattccactgccgcccgccacagcaggttggagagcagtgacggggatggggcctggtgccccgcagggtcggtgtttcccaaggaggaggagtacttgcaggtggatctacaacgactgcacctggtggctctggtgggcacccagggacggcatgccgggggcctgggcaaggagttctcccggagctaccggctgcgttactcccgggatggtcgccgctggatgggctggaaggaccgctggggtcaggaggtgatctcaggcaatgaggaccctgagggagtggtgctgaaggaccttgggccccccatggttgcccgactggttcgcttctacccccgggctgaccgggtcatgagcgtctgtctgcgggtagagctctatggctgcctctggagggatggactcctgtcttacaccgcccctgtggggcagacaatgtatttatctgaggccgtgtacctcaacgactccacctatgacggacataccgtgggcggactgcagtatgggggtctgggccagctggcagatggtgtggtggggctggatgactttaggaagagtcaggagctgcgggtctggccaggctatgactatgtgggatggagcaaccacagcttctccagtggctatgtggagatggagtttgagtttgaccggctgagggccttccaggctatgcaggtccactgtaacaacatgcacacgctgggagcccgtctgcctggcggggtggaatgtcgcttccggcgtggccctgccatggcctgggagggggagcccatgcgccacaacctagggggcaacctgggggaccccagagcccgggctgtctcagtgccccttggcggccgtgtggctcgctttctgcagtgccgcttcctctttgcggggccctggttactcttcagcgaaatctccttcatctctgatgtggtgaacaattcctctccggcactgggaggcaccttcccgccagccccctggtggccgcctggcccacctcccaccaacttcagcagcttggagctggagcccagaggccagcagcccgtggccaaggccgaggggagcccgaccgccatcctcatcggctgcctggtggccatcatcctgctcctgctgctcatcattgccctcatgctctggcggctgcactggcgcaggctcctcagcaaggctgaacggagggtgttggaagaggagctgacggttcacctctctgtccctggggacactatcctcatcaacaaccgcccaggtcctagagagccacccccgtaccaggagccccggcctcgtgggaatccgccccactctgctccctgtgtccccaatggctctgcgttgctgctctccaatccagcctaccgcctccttctggccacttacgcccgtccccctcgaggcccgggcccccccacacccgcctgggccaaacccaccaacacccaggcctacagtggggactatatggagcctgagaagccaggcgccccgcttctgcccccacctccccagaacagcgtcccccattatgccgaggctgacattgttaccctgcagggcgtcaccgggggcaacacctatgctgtgcctgcactgcccccaggggcagtcggggatgggccccccagagtggatttccctcgatctcgactccgcttcaaggagaagcttggcgagggccagtttggggaggtgcacctgtgtgaggtcgacagccctcaagatctggtcagtcttgatttcccccttaatgtgcgtaagggacaccctttgctggtagctgtcaagatcttacggccagatgccaccaagaatgccaggaatgatttcctgaaagaggtgaagatcatgtcgaggctcaaggacccaaacatcattcggctgctgggcgtgtgtgtgcaggacgaccccctctgcatgattactgactacatggagaacggcgacctcaaccagttcctcagtgcccaccagctggaggacaaggcagccgagggggcccctggggacgggcaggctgcgcaggggcccaccatcagctacccaatgctgctgcatgtggcagcccagatcgcctccggcatgcgctatctggccacactcaactttgtacatcgggacctggccacgcggaactgcctagttggggaaaatttcaccatcaaaatcgcagactttggcatgagccggaacctctatgctggggactattaccgtgtgcagggccgggcagtgctgcccatccgctggatggcctgggagtgcatcctcatggggaagttcacgactgcgagtgacgtgtgggcctttggtgtgaccctgtgggaggtgctgatgctctgtagggcccagccctttgggcagctcaccgacgagcaggtcatcgagaacgcgggggagttcttccgggaccagggccggcaggtgtacctgtcccggccgcctgcctgcccgcagggcctatatgagctgatgcttcggtgctggagccgggagtctgagcagcgaccacccttttcccagctgcatcggttcctggcagaggatgcactcaacacggtgtgaatcacacatccagctgcccctccctcagggagcgatccaggggaagccagtgacactaaaacaagaggacacaatggcacctctgcccttcccctcccgacagcccatcacctctaatagaggcagtgagactgcaggtgggctgggcccacccagggagctgatgccccttctccccttcctggacacactctcatgtccccttcctgttcttccttcctagaagcccctgtcgcccacccagctggtcctgtggatgggatcctctccaccctcctctagccatcccttggggaagggtggggagaaatataggatagacactggacatggcccattggagcacctgggccccactggacaacactgattcctggagaggtggctgcgcccccagcttctctctccctgtcacacactggaccccactggctgagaatctgggggtgaggaagacaagaaggagaggaaaatgtttccttgtgcctgctcctgtacttgtcctcagcttgggcttcttcctcctccatcacctgaaacactggacctgggggtagccccgccccagccctcagtcacccccacttcccacttgcagtcttgtagctagaacttctctaagcctatacgtttctgtggagtaaatattgggattggggggaaagagggagcaacggcccatagccttggggttggacatctctagtgtagctgccacattgatttttctataatcacttggggtttgtacatttttggggggagagacacagatttttacactaatatatggacctagcttgaggcaattttaatcccctgcactaggcaggtaataataaaggttgagttttccacaa

SEQ ID NO: 344837 - protein, 58 aa, Artificial Sequence
  derived and/or modified sequence
MGPEALSSLLLLLLVASGDADMKGHFDPAKCRYALGMQDRTIPDSDISASSSWSDSTA

SEQ ID NO: 344838 - protein, 243 aa, Artificial Sequence
  derived and/or modified sequence
MGPEALSSLLLLLLVASGDADMKGHFDPAKCRYALGMQDRTIPDSDISASSSWSDSTAARHSRLESSDGDGAWCPAGSVFPKEEEYLQVDLQRLHLVALVGTQGRHAGGLGKEFSRSYRLRYSRDGRRWMGWKDRWGQEVISGNEDPEGVVLKDLGPPMVARLVRFYPRADRVMSVCLRVELYGCLWRDCSMGVWASWQMVWWGWMTLGRVRSCGSGQAMTMWDGATTASPVAMWRWSLSLTG

SEQ ID NO: 344839 - protein, 55 aa, Artificial Sequence
  derived and/or modified sequence
MGPEALSSLLLLLLVASGDADMKGHFDPAKCRYALGMQDRTIPDSDISASSSWSD

SEQ ID NO: 344840 - DNA, 2882 bp, Artificial Sequence
  derived and/or modified sequence
atgggaccagaggccctgtcatctttactgctgctgctcttggtggcaagtggagatgctgacatgaagggacattttgatcctgccaagtgccgctatgccctgggcatgcaggaccggaccatcccagacagtgacatctctgcttccagctcctggtcagattccactgccgcccgccacagcaggttggagagcagtgacggggatggggcctggtgccccgcagggtcggtgtttcccaaggaggaggagtacttgcaggtggatctacaacgactgcacctggtggctctggtgggcacccagggacggcatgccgggggcctgggcaaggagttctcccggagctaccggctgcgttactcccgggatggtcgccgctggatgggctggaaggaccgctggggtcaggaggtgatctcaggcaatgaggaccctgagggagtggtgctgaaggaccttgggccccccatggttgcccgactggttcgcttctacccccgggctgaccgggtcatgagcgtctgtctgcgggtagagctctatggctgcctctggagggatggactcctgtcttacaccgcccctgtggggcagacaatgtatttatctgaggccgtgtacctcaacgactccacctatgacggacataccgtgggcggactgcagtatgggggtctgggccagctggcagatggtgtggtggggctggatgactttaggaagagtcaggagctgcgggtctggccaggctatgactatgtgggatggagcaaccacagcttctccagtggctatgtggagatggagtttgagtttgaccggctgagggccttccaggctatgcaggtccactgtaacaacatgcacacgctgggagcccgtctgcctggcggggtggaatgtcgcttccggcgtggccctgccatggcctgggagggggagcccatgcgccacaacctagggggcaacctgggggaccccagagcccgggctgtctcagtgccccttggcggccgtgtggctcgctttctgcagtgccgcttcctctttgcggggccctggttactcttcagcgaaatctccttcatctctgatgtggtgaacaattcctctccggcactgggaggcaccttcccgccagccccctggtggccgcctggcccacctcccaccaacttcagcagcttggagctggagcccagaggccagcagcccgtggccaaggccgaggggagcccgaccgccatcctcatcggctgcctggtggccatcatcctgctcctgctgctcatcattgccctcatgctctggcggctgcactggcgcaggctcctcagcaaggctgaacggagggtgttggaagaggagctgacggttcacctctctgtccctggggacactatcctcatcaacaaccgcccaggtcctagagagccacccccgtaccaggagccccggcctcgtgggaatccgccccactccgctccctgtgtccccaatggctctgcgttgctgctctccaatccagcctaccgcctccttctggccacttacgcccgtccccctcgaggcccgggcccccccacacccgcctgggccaaacccaccaacacccaggcctacagtggggactatatggagcctgagaagccaggcgccccgcttctgcccccacctccccagaacagcgtcccccattatgccgaggctgacattgttaccctgcagggcgtcaccgggggcaacacctatgctgtgcctgcactgcccccaggggcagtcggggatgggccccccagagtggatttccctcgatctcgactccgcttcaaggagaagcttggcgagggccagtttggggaggtgcacctgtgtgaggtcgacagccctcaagatctggttagtcttgatttcccccttaatgtgcgtaagggacaccctttgctggtagctgtcaagatcttacggccagatgccaccaagaatgccagcttctccttgttctccaggaatgatttcctgaaagaggtgaagatcatgtcgaggctcaaggacccaaacatcattcggctgctgggcgtgtgtgtgcaggacgaccccctctgcatgattactgactacatggagaacggcgacctcaaccagttcctcagtgcccaccagctggaggacaaggcagccgagggggcccctggggacgggcaggctgcgcaggggcccaccatcagctacccaatgctgctgcatgtggcagcccagatcgcctccggcatgcgctatctggccacactcaactttgtacatcgggacctggccacgcggaactgcctagttggggaaaatttcaccatcaaaatcgcagactttggcatgagccggaacctctatgctggggactattaccgtgtgcagggccgggcagtgctgcccatccgctggatggcctgggagtgcatcctcatggggaagttcacgactgcgagtgacgtgtgggcctttggtgtgaccctgtgggaggtgctgatgctctgtagggcccagccctttgggcagctcaccgacgagcaggtcatcgagaacgcgggggagttcttccgggaccagggccggcaggtgtacctgtcccggccgcctgcctgcccgcagggcctatatgagctgatgcttcggtgctggagccgggagtctgagcagcgaccacccttttcccagctgcatcggttcctggcagaggatgcactcaacacggtgtgaatcacacatccagctgcccctccctcagggagcgatccaggggaagccagtgacactaaaacaagaggacacaatggcacctctgcccttcccctcccgacagcccatcacctctaatagag

SEQ ID NO: 344841 - DNA, 1996 bp, Artificial Sequence
  derived and/or modified sequence
cctacagtggggactatatggagcctgagaagccaggcgccccgcttctgcccccacctccccagaacagcgtcccccattatgccgaggctgacattgttaccctgcagggcgtcaccgggggcaacacctatgctgtgcctgcactgcccccaggggcagtcggggatgggccccccagagtggatttccctcgatctcgactccgcttcaaggagaagcttggcgagggccagtttggggaggtgcacctgtgtgaggtcgacagccctcaagatctggtcagtcttgatttcccccttaatgtgcgtaagggacaccctttgctggtagctgtcaagatcttacggccagatgccaccaagaatgccagcttctccttgttctccaggaatgatttcctgaaagaggtgaagatcatgtcgaggctcaaggacccaaacatcattcggctgctgggcgtgtgtgtgcaggacgaccccctctgcatgattactgactacatggagaacggcgacctcaaccagttcctcagtgcccaccagctggaggacaaggcagccgagggggcccctggggacgggcaggctgcgcaggggcccaccatcagctacccaatgctgctgcatgtggcagcccagatcgcctccggcatgcgctatctggccacactcaactttgtacatcgggacctggccacgcggaactgcctagttggggaaaatttcaccatcaaaatcgcagactttggcatgagccggaacctctatgctggggactattaccgtgtgcagggccgggcagtgctgcccatccgctggatggcctgggagtgcatcctcatggggaagttcacgactgcgagtgacgtgtgggcctttggtgtgaccctgtgggaggtgctgatgctctgtagggcccagccctttgggcagctcaccgacgagcaggtcatcgagaacgcgggggagttcttccgggaccagggccggcaggtgtacctgtcccggccgcctgcctgcccgcagggcctatatgagctgatgcttcggtgctggagccgggagtctgagcagcgaccacccttttcccagctgcatcggttcctggcagaggatgcactcaacacggtgtgaatcacacatccagctgcccctccctcagggagcgatccaggggaagccagtgacactaaaacaagaggacacaatggcacctctgcccttcccctcccgacagcccatcacctctaatagaggcagtgagactgcaggtgggctgggcccacccagggagctgatgccccttctccccttcctggacacactctcatgtccccttcctgttcttccttcctagaagcccctgtcgcccacccagctggtcctgtggatgggatcctctccaccctcctctagccatcccttggggaagggtggggagaaatataggatagacactggacatggcccattggagcacctgggccccactggacaacactgattcctggagaggtggctgcgcccccagcttctctctccctgtcacacactggaccccactggctgagaatctgggggtgaggaagacaagaaggagaggaaaatgtttccttgtgcctgctcctgtacttgtcctcagcttgggcttcttcctcctccatcacctgaaacactggacctgggggtagccccgccccagccctcagtcacccccacttcccacttgcagtcttgtagctagaacttctctaagcctatacgtttctgtggagtaaatattgggattggggggaaagagggagcaacggcccatagccttggggttggacatctctagtgtagctgccacattgatttttctataatcacttggggtttgtacatttttggggggagagacacagatttttacactaatatatggacctagcttgaggcaattttaatcccctgcactaggcaggtaataataaaggttgagttttccacaa

SEQ ID NO: 344842 - DNA, 1996 bp, Artificial Sequence
  derived and/or modified sequence
cctacagtggggactatatggagcctgagaagccaggcgccccgcttctgcccccacctccccagaacagcgtcccccattatgccgaggctgacattgttaccctgcagggcgtcaccgggggcaacacctatgctgtgcctgcactgcccccaggggcagtcggggatgggccccccagagtggatttccctcgatctcgactccgcttcaaggagaagcttggcgagggccagtttggggaggtgcacctgtgtgaggtcgacagccctcaagatctggttagtcttgatttcccccttaatgtgcgtaagggacaccctttgctggtagctgtcaagatcttacggccagatgccaccaagaatgccagcttctccttgttctccaggaatgatttcctgaaagaggtgaagatcatgtcgaggctcaaggacccaaacatcattcggctgctgggcgtgtgtgtgcaggacgaccccctctgcatgattactgactacatggagaacggcgacctcaaccagttcctcagtgcccaccagctggaggacaaggcagccgagggggcccctggggacgggcaggctgcgcaggggcccaccatcagctacccaatgctgctgcatgtggcagcccagatcgcctccggcatgcgctatctggccacactcaactttgtacatcgggacctggccacgcggaactgcctagttggggaaaatttcaccatcaaaatcgcagactttggcatgagccggaacctctatgctggggactattaccgtgtgcagggccgggcagtgctgcccatccgctggatggcctgggagtgcatcctcatggggaagttcacgactgcgagtgacgtgtgggcctttggtgtgaccctgtgggaggtgctgatgctctgtagggcccagccctttgggcagctcaccgacgagcaggtcatcgagaacgcgggggagttcttccgggaccagggccggcaggtgtacctgtcccggccgcctgcctgcccgcagggcctatatgagctgatgcttcggtgctggagccgggagtctgagcagcgaccacccttttcccagctgcatcggttcctggcagaggatgcactcaacacggtgtgaatcacacatccagctgcccctccctcagggagcgatccaggggaagccagtgacactaaaacaagaggacacaatggcacctctgcccttcccctcccgacagcccatcacctctaatagaggcagtgagactgcaggtgggctgggcccacccagggagctgatgccccttctccccttcctggacacactctcatgtccccttcctgttcttccttcctagaagcccctgtcgcccacccagctggtcctgtggatgggatcctctccaccctcctctagccatcccttggggaagggtggggagaaatataggatagacactggacatggcccattggagcacctgggccccactggacaacactgattcctggagaggtggctgcgcccccagcttctctctccctgtcacacactggaccccactggctgagaatctgggggtgaggaggacaagaaggagaggaaaatgtttccttgtgcctgctcctgtacttgtcctcagcttgggcttcttcctcctccatcacctgaaacactggacctgggggtagccccgccccagccctcagtcacccccacttcccacttgcagtcttgtagctagaacttctctaagcctatacgtttctgtggagtaaatattgggattggggggaaagagggagcaacggcccatagccttggggttggacatctctagtgtagctgccacattgatttttctataatcacttggggtttgtacatttttggggggagagacacagatttttacactaatatatggacctagcttgaggcaattttaatcccctgcactaggcaggtaataataaaggttgagttttccacaa

SEQ ID NO: 344843 - DNA, 1996 bp, Artificial Sequence
  derived and/or modified sequence
cctacagtggggactatatggagcctgagaagccaggcgccccgcttctgcccccacctccccagaacagcgtcccccattatgccgaggctgacattgttaccctgcagggcgtcaccgggggcaacacctatgctgtgcctgcactgcccccaggggcagtcggggatgggccccccagagtggatttccctcgatctcgactccgcttcaaggagaagcttggcgagggccagtttggggaggtgcacctgtgtgaggtcgacagccctcaagatctggtcagtcttgatttcccccttaatgtgcgtaagggacaccctttgctggtagctgtcaagatcttacggccagatgccaccaagaatgccagcttctccttgttctccaggaatgatttcctgaaagaggtgaagatcatgtcgaggctcaaggaccccaacatcattcggctgctgggcgtgtgtgtgcaggacgaccccctctgcatgattactgactacatggagaacggcgacctcaaccagttcctcagtgcccaccagctggaggacaaggcagccgagggggcccctggggacgggcaggctgcgcaggggcccaccatcagctacccaatgctgctgcatgtggcagcccagatcgcctccggcatgcgctatctggccacactcaactttgtacatcgggacctggccacgcggaactgcctagttggggaaaatttcaccatcaaaatcgcagactttggcatgagccggaacctctatgctggggactattaccgtgtgcagggccgggcagtgctgcccatccgctggatggcctgggagtgcatcctcatggggaagttcacgactgcgagtgacgtgtgggcctttggtgtgaccctgtgggaggtgctgatgctctgtagggcccagccctttgggcagctcaccgacgagcaggtcatcgagaacgcgggggagttcttccgggaccagggccggcaggtgtacctgtcccggccgcctgcctgcccgcagggcctatatgagctgatgcttcggtgctggagccgggagtctgagcagcgaccacccttttcccagctgcatcggttcctggcagaggatgcactcaacacggtgtgaatcacacatccagctgcccctccctcagggagtgatccaggggaagccagtgacactaaaacaagaggacacaatggcacctctgcccttcccctcccgacagcccatcacctctaatagaggcagtgagactgcaggtgggctgggcccacccagggagctgatgccccttctccccttcctggacacactctcatgtccccttcctgttcttccttcctagaagcccctgtcgcccacccagctggtcctgtggatgggatcctctccaccctcctctagccatcccttggggaagggtggggagaaatataggatagacactggacatggcccattggagcacctgggccccactggacaacactgattcctggagaggtggctgcgcccccagcttctctctccctgtcacacactggaccccactggctgagaatctgggggtgaggaggacaagaaggagaggaaaatgtttccttgtgcctgctcctgtacttgtcctcagcttgggcttcttcctcctccatcacctgaaacactggacctgggggtagccccgccccagccctcagtcacccccacttcccacctgcagtcttgtagctagaacttctctaagcctatacgtttctgtggagtaaatattgggattggggggaaagagggagcaacggcccatagccttggggttggacatctctagtgtagctgccacattgatttttctataatcacttggggtttgtacatttttggggggagagacacagatttttacactaatatatggacctagcttgaggcaattttaatcccctgcactaggcaggtaataataaaggttgagttttccacaa

SEQ ID NO: 344844 - protein, 2157 aa, Artificial Sequence
  derived and/or modified sequence
MSDRSGPTAKGKDGKKYSSLNLFDTYKGKSLEIQKPAVAPRHGLQSLGKVAIARRMPPPANLPSLKAENKGNDPNVSLVPKDGTGWASKQEQSDPKSSDASTAQPPESQPLPASQTPASNQPKRPPAAPENTPLVPSGVKSWAQASVTHGAHGDGGRASSLLSRFSREEFPTLQAAGDQDKAAKERESAEQSSGPGPSLRPQNSTTWRDGGGRGPDELEGPDSKLHHGHDPRGGLQPSGPPQFPPYRGMMPPFMYPPYLPFPPPYGPQGPYRYPTPDGPSRFPRVAGPRGSGPPMRLVEPVGRPSILKEDNLKEFDQLDQENDDGWAGAHEEVDYTEKLKFSDEEDGRDSDEEGAEGHRDSQSASGEERPPEADGKKGNSPNSEPPTPKTAWAETSRPPETEPGPPAPKPPLPPPHRGPAGNWGPPGDYPDRGGPPCKPPAPEDEDEAWRQRRKQSSSEISLAVERARRRREEEERRMQEERRAACAEKLKRLDEKFGAPDKRLKAEPAAPPAAPSTPAPPPAVPKELPAPPAPPPASAPTPEKEPEEPAQAPPAQSTPTPGVAAAPTLVSGGGSTSSTSSGSFEASPVEPQLPSKEGPEPPEEVPPPTTPPVPKVEPKGDGIGPTRQPPSQGLGYPKYQKSLPPRFQRQQQEQLLKQQQQHQWQQHQQGSAPPTPVPPSPPQPVTLGAVPAPQAPPPPPKALYPGALGRPPPMPPMNFDPRWMMIPPYVDPRLLQGRPPLDFYPPGVHPSGLVPRERSDSGGSSSEPFDRHAPAMLRERGTPPVDPKLAWVGDVFTATPAEPRPLTSPLRQAADEDDKGMRSETPPVPPPPPYLASYPGFPENGAPGPPISRFPLEEPGPRPLPWPPGSDEVAKIQTPPPKKEPPKEETAQLTGPEAGRKPARGVGSGGQGPPPPRRESRTETRWGPRPGSSRRGIPPEEPGAPPRRAGPIKKPPPPTKVEELPPKPLEQGDETPKPPKPDPLKITKGKLGGPKETPPNGNLSPAPRLRRDYSYERVGPTSCRGRGRGEYFARGRGFRGTYGGRGRGARSREFRSYREFRGDDGRGGGTGGPNHPPAPRGRTASETRSEGSEYEEIPKRRRQRGSETGSETHESDLAPSDKEAPTPKEGTLTQVPLAPPPPGAPPSPAPARFTARGGRVFTPRGVPSRRGRGGGRPPPQVCPGWSPPAKSLAPKKPPTGPLPPSKEPLKEKLIPGPLSPVARGGSNGGSNVGMEDGERPRRRRHGRAQQQDKPPRFRRLKQERENAARGSEGKPSLTLPASAPGPEEALTTVTVAPAPRRAAAKSPDLSNQNSDQANEEWETASESSDFTSERRGDKEAPPPVLLTPKAVGTPGGGGGGAVPGISAMSRGDLSQRAKDLSKRSFSSQRPGMERQNRRPGPGGKAGSSGSSSGGGGGGPGGRTGPGRGDKRSWPSPKNRSRPPEERPPGLPLPPPPPSSSAVFRLDQVIHSNPAGIQQALAQLSSRQGSVTAPGGHPRHKPGPPQAPQGPSPRPPTRYEPQRVNSGLSSDPHFEEPGPMVRGVGGTPRDSAGVSPFPPKRRERPPRKPELLQEESLPPPHSSGFLGSKPEGPGPQAESRDTGTEALTPHIWNRLHTATSRKSYRPSSMEPWMEPLSPFEDVAGTEMSQSDSGVDLSGDSQVSSGPCSQRSSPDGGLKGAAEGPPKRPGGSSPLNAVPCEGPPGSEPPRRPPPAPHDGDRKELPREQPLPPGPIGTERSQHTDRGTEPGPIRPSHRPGPPVQFGTSDKDSDLRLVVGDSLKAEKELTASVTEAIPVSRDWELLPSAAASAEPQSKNLDSGHCVPEPSSSGQRLYPEVFYGSAGPSSSQISGGAMDSQLHPNSGGFRPGTPSLHPYRSQPLYLPPGPAPPSALLSGVALKGQFLDFSTMQATELGKLPAGGVLYPPPSFLYSPAFCPSPLPDTSLLQVRQDLPSPSDFYSTPLQPGGQSGFLPSGAPAQQMLLPMVDSQLPVVNFGSLPPAPPPAPPSLSLLPVGPALQPPSLAVRPPPAPATRVLPSPARPFPASLGRAELHPVELKPFQDYQKLSSNLGGPGSSRTPPTGRSFSGLNSRLKATPSTYSGVFRTQRVDLYQQASPPDALRWIPKPWERTGPPPREGPSRRAEEPGSRGDKEPGLPPPR

SEQ ID NO: 344845 - protein, 2157 aa, Artificial Sequence
  derived and/or modified sequence
MSDRSGPTAKGKDGKKYSSLNLFDTYKGKSLEIQKPAVAPRHGLQSLGKVAIARRMPPPANLPSLKAENKGNDPNVSLVPKDGTGWASKQEQSDPKSSDASTAQPLESQPLPASQTPASNQPKRPPAAPENTPLVPSGVKSWAQASVTHGAHGDGGRASSLLSRFSREEFPTLQAAGDQDKAAKERESAEQSSGPGPSLRPQNSTTWRDGGGRGPDELEGPDSKLHHGHDPRGGLQPSGPPQFPPYRGMMPPFMYPPYLPFPPPYGPQGPYRYPTPDGPSRFPRVAGPRGSGPPMRLVEPVGRPSILKEDNLKEFDQLDQENDDGWAGAHEEVDYTEKLKFSDEEDGRDSDEEGAEGHRDSQSASGEERPPEADGKKGNSPNSEPPTPKTAWAETSRPPETEPGPPAPKPPLPPPHRGPAGNWGPPGDYPDRGGPPCKPPAPEDEDEAWRQRRKQSSSEISLAVERARRRREEEERRMQEERRAACAEKLKRLDEKFGAPDKRLKAEPAAPPAAPSTPAPPPAVPKELPAPPAPPPASAPTPEKEPEEPAQAPPAQSTPTPGVAAAPTLVSGGGSTSSTSSGSFEASPVEPQLPSKEGPEPPEEVPPPTTPPVPKVEPKGDGIGPTRQPPSQGLGYPKYQKSLPPRFQRQQQEQLLKQQQQHQWQQHQQGSAPPTPVPPSPPQPVTLGAVPAPQAPPPPPKALYPGALGRPPPMPPMNFDPRWMMIPPYVDPRLLQGRPPLDFYPPGVHPSGLVPRERSDSGGSSSEPFDRHAPAMLRERGTPPVDPKLAWVGDVFTATPAEPRPLTSPLRQAADEDDKGMRSETPPVPPPPPYLASYPGFPENGAPGPPISRFPLEEPGPRPLPWPPGSDEVAKIQTPPPKKEPPKEETAQLTGPEAGRKPARGVGSGGQGPPPPRRESRTETRWGPRPGSSRRGIPPEEPGAPPRRAGPIKKPPPPTKVEELPPKPLEQGDETPKPPKPDPLKITKGKLGGPKETPPNGNLSPAPRLRRDYSYERVGPTSCRGRGRGEYFARGRGFRGTYGGRGRGARSREFRSYREFRGDDGRGGGTGGPNHPPAPRGRTASETRSEGSEYEEIPKRRRQRGSETGSETHESDLAPSDKEAPTPKEGTLTQVPLAPPPPGAPPSPAPARFTARGGRVFTPRGVPSRRGRGGGRPPPQVCPGWSPPAKSLAPKKPPTGPLPPSKEPLKEKLIPGPLSPVARGGSNGGSNVGMEDGERPRRRRHGRAQQQDKPPRFRRLKQERENAARGSEGKPSLTLPASAPGPEEALTTVTVAPAPRRAAAKSPDLSNQNSDQANEEWETASESSDFTSERRGDKEAPPPVLLTPKAVGTPGGGGGGAVPGISAMSRGDLSQRAKDLSKRSFSSQRPGMERQNRRPGPGGKAGSSGSSSGGGGGGPGGRTGPGRGDKRSWPSPKNRSRPPEERPPGLPLPPPPPSSSAVFRLDQVIHSNPAGIQQALAQLSSRQGSVTAPGGHPRHKPGPPQAPQGPSPRPPTRYEPQRVNSGLSSDPHFEEPGPMVRGVGGTPRDSAGVSPFPPKRRERPPRKPELLQEESLPPPHSSGFLGSKPEGPGPQAESRDTGTEALTPHIWNRLHTATSRKSYRPSSMEPWMEPLSPFEDVAGTEMSQSDSGVDLSGDSQVSSGPCSQRSSPDGGLKGAAEGPPKRPGGSSPLNAVPCEGPPGSEPPRRPPPAPHDGDRKELPREQPLPPGPIGTERSQRTDRGTEPGPIRPSHRPGPPVQFGTSDKDSDLRLVVGDSLKAEKELTASVTEAIPVSRDWELLPSAAASAEPQSKNLDSGHCVPEPSSSGQRLYPEVFYGSAGPSSSQISGGAMDSQLHPNSGGFRPGTPSLHPYRSQPLYLPPGPAPPSALLSGVALKGQFLDFSTMQATELGKLPAGGVLYPPPSFLYSPAFCPSPLPDTSLLQVRQDLPSPSDFYSTPLQPGGQSGFLPSGAPAQQMLLPMVDSQLPVVNFGSLPPAPPPAPPPLSLLPVGPALQPPSLAVRPPPAPATRVLPSPARPFPASLGRAELHPVELKPFQDYQKLSSNLGGPGSSRTPPTGRSFSGLNSRLKATPSTYSGVFRTQRVDLYQQASPPDALRWIPKPWERTGPPPREGPSRRAEEPGSRGDKEPGLPPPR

SEQ ID NO: 344846 - protein, 2157 aa, Artificial Sequence
  derived and/or modified sequence
MSDRSGPTAKGKDGKKYSSLNLFDTYKGKSLEIQKPAVAPRHGLQSLGKVAIARRMPPPANLPSLKAENKGNDPNVSLVPKDGTGWASKQEQSDPKSSDASTAQPPESQPLPASQTPASNQPKRPPAAPENTPLVPSGVKSWAQASVTHGAHGDGGRASSLLSRFSREEFPTLQAAGDQDKAAKERESAEQSSGPGPSLRPQNSTTWRDGGGRGPDELEGPDSKLHHGHDPRGGLQPSGPPQFPPYRGMMPPFMYPPYLPFPPPYGPQGPYRYPTPDGPSRFPRVAGPRGSGPPMRLVEPVGRPSILKEDNLKEFDQLDQENDDGWAGAHEEVDYTEKLKFSDEEDGRDSDEEGAEGHRDSQSASGEERPPEADGKKGNSPNSEPPTPKTAWAETSRPPETEPGPPAPKPPLPPPHRGPAGNWGPPGDYPDRGGPPCKPPAPEDEDEAWRQRRKQSSSEISLAVERARRRREEEERRMQEERRAACAEKLKRLDEKFGAPDKRLKAEPAAPPAAPSTPAPPPAVPKELPAPPAPPPASAPTPEKEPEEPAQAPPAQSTPTPGVAAAPTLVSGGGSTSSTSSGSFEASPVEPQLPSKEGPEPPEEVPPPTTPPVPKVEPKGDGIGPTRQPPSQGLGYPKYQKSLPPRFQRQQQEQLLKQQQQHQWQQHQQGSAPPTPVPPSPPQPVTLGAVPAPQAPPPPPKALYPGALGRPPPMPPMNFDPRWMMIPPYVDPRLLQGRPPLDFYPPGVHPSGLVPRERSDSGGSSSEPFDRHAPAMLRERGTPPVDPKLAWVGDVFTATPAEPRPLTSPLRQAADEDDKGMRSETPPVPPPPPYLASYPGFPENGAPGPPISRFPLEEPGPRPLPWPPGSDEVAKIQTPPPKKEPPKEETAQLTGPEAGRKPARGVGSGGQGPPPPRRESRTETRWGPRPGSSRRGIPPEEPGAPPRRAGPIKKPPPPTKVEELPPKPLEQGDETPKPPKPDPLKITKGKLGGPKETPPNGNLSPAPRLRRDYSYERVGPTSCRGRGRGEYFARGRGFRGTYGGRGRGARSREFRSYREFRGDDGRGGGTGGPNHPPAPRGRTASETRSEGSEYEEIPKRRRQRGSETGSETHESDLAPSDKEAPTPKEGTLTQVPLAPPPPGAPPSPAPARFTARGGRVFTPRGVPSRRGRGGGRPPPQVCPGWSPPAKSLAPKKPPTGPLPPSKEPLKEKLIPGPLSPVARGGSNGGSNVGMEDGERPRRRRHGRAQQQDKPPRFRRLKQERENAARGSEGKPSLTLPASAPGPEEALTTVTVAPAPRRAAAKSPDLSNQNSDQANEEWETASESSDFTSERRGDKEAPPPVLLTPKAVGTPGGGGGGAVPGISAMSRGDLSQRAKDLSKRSFSSQRPGMERQNRRPGPGGKAGSSGSSSGGGGGGPGGRTGPGRGDKRSWPSPKNRSRPPEERPPGLPLPPPPPSSSAVFRLDQVIHSNPAGIQQALAQLSSRQGSVTAPGGHPRHKPGPPQAPQGPSPRPPTRYEPQRVNSGLSSDPHFEEPGPMVRGVGGTPRDSAGVSPFPPKRRERPPRKPELLQEESLPPPHSSGFLGSKPEGPGPQAESRDTGTEALTPHIWNRLHTATSRKSYRPSSMEPWMEPLSPFEDVAGTEMSQSDSGVDLSGDSQVSSGPCSQRSSPDGGLKGAAEGPPKRPGGSSPLNAVPCEGPPGSEPPRRPPPAPHDGDRKELPREQPLPPGPIGTERSQRTDRGTEPGPIRPSHRPGPPVQFGTSDKDSDLRLVVGDSLKAEKELTASVTEAIPVSRDWELLPSAAASAEPQSKNLDSGHCVPEPSSSGQRLYPEVFYGSAGPSSSQISGGAMDSQLHPNSGGFRPGTPSLHPYRSQPLYLPPGPAPPSALLSGVALKGQFLDFSTMQATELGKLPAGGVLYPPPSFLYSPAFCPSPLPDTSLLQVRQDLPSPSDFYSTPLQPGGQSGFLPSGAPAQQMLLPMVDSQLPVVNFGSLPPAPPPAPPPLSLLPVGPALQPPSLAVRPPPAPATRVLPSPARPFPASLGRAELHPVELKPFQDYQKLSSNLGGPGSSRTPPTGRSFSGLNSRLKATPSTYSGVFRTQRVDLYQQASPPDALRWIPKPWERTGPPPREGPSRRAEEPGSRGDKEPGLPPPR

SEQ ID NO: 344847 - protein, 2149 aa, Artificial Sequence
  derived and/or modified sequence
MSDRSGPTAKGKDGKKYSSLNLFDTYKGKSLEIQKPAVAPRHGLQSLGKVAIARRMPPPANLPSLKAENKGNDPNVSLVPKDGTGWASKQEQSDPKSSDASTAQPLESQPLPASQTPASNQPKRPPAAPENTPLVPSGVKSWAQASVTHGAHGDGGRASSLLSRFSREEFPTLQAAGDQDKAAKERESAEQSSGPGPSLRPQNSTTWRDGGGRGPDELEGPDSKLHHGHDPRGGLQPSGPPQFPPYRGMMPPFMYPPYLPFPPPYGPQGPYRYPTPDGPSRFPRVAGPRGSGPPMRLVEPVGRPSILKEDNLKEFDQLDQENDDGWAGAHEEVDYTEKLKFSDEEDGRDSDEEGAEGHRDSQSASGEERPPEADGKKGNSPNSEPPTPKTAWAETSRPPETEPGPPAPKPPLPPPHRGPAGNWGPPGDYPDRGGPPCKPPAPEDEDEAWRQRRKQSSSEISLAVERARRRREEEERRMQEERRAACAEKLKRLDEKFGAPDKRLKAEPAAPPAAPSTPAPPPAVPKELPAPPAPPPASAPTPEKEPEEPAQAPPAQSTPTPGVAAAPTLVSGGGSTSSTSSGSFEASPVEPQLPSKEGPEPPEEVPPPTTPPVPKVEPKGDGIGPTRQPPSQGLGYPKYQKSLPPRFQRQQQEQLLKQQQQHQWQQHQQGSAPPTPVPPSPPQPVTLGAVPAPQAPPPPPKALYPGALGRPPPMPPMNFDPRWMMIPPYVDPRLLQGRPPLDFYPPGVHPSGLVPRERSDSGGSSSEPFDRHAPAMLRERGTPPVDPKLAWVGDVFTATPAEPRPLTSPLRQAADEDDKGMRSETPPVPPPPPYLASYPGFPENGAPGPPISRFPLEEPGPRPLPWPPGSDEVAKIQTPPPKKEPPKEETAQLTGPEAGRKPARGVGSGGQGPPPPRRESRTETRWGPRPGSSRRGIPPEEPGAPPRRAGPIKKPPPPTKVEELPPKPLEQGDETPKPPKPDPLKITKGKLGGPKETPPNGNLSPAPRLRRDYSYERVGPTSCRGRGRGEYFARGRGFRGTYGGRGRGAAGNSAVTESFEEMMGVEVGQGDQTTLLLPEAALPARHGARVQSMRKSPSGAGSGAQKQAARPMRVIWLLQTRRLPHPRREHSPRSRSPTTRSPTFPAPARFTPGVGESSLPEGISPGPRRREPPQVCPGWSPPAKSLAPKKPPTGPLPPSKEPLKEKLIPGPLSPVARGGSNGGSNVGMEDGERPRRRRHGRAQQQDKPPRFRRLKQERENAARGSEGKPSLTLPASAPGPEEALTTVTVAPAPRRAAAKSPDLSNQNSDQANEEWETASESSDFTSERRGDKEAPPPVLLTPKAVGTPGGGGGGAVPGISAMSRGDLSQRAKDLSKRSFSSQRPGMERQNRRPGPGGKAGSSGSSSGGGGGGPGGRTGPGRGDKRSWPSPKNRSRPPEERPPGLPLPPPPPSSSAVFRLDQVIHSNPAGIQQALAQLSSRQGSVTAPGGHPRHKPGPPQAPQGPSPRPPTRYEPQRVNSGLSSDPHFEEPGPMVRGVGGTPRDSAGVSPFPPKRRERPPRKPELLQEESLPPPHSSGFLGSKPEGPGPQAESRDTGTEALTPHIWNRLHTATSRKSYRPSSMEPWMEPLSPFEDVAGTEMSQSDSGVDLSGDSQVSSGPCSQRSSPDGGLKGAAEGPPKRPGGSSPLNAVPCEGPPGSEPPRRPPPAPHDGDRKELPREQPLPPGPIGTERSQRTDRGTEPGPIRPSHRPGPPVQFGTSDKDSDLRLVVGDSLKAEKELTASVTEAIPVSRDWELLPSAAASAEPQSKNLDSGHCVPEPSSSGQRLYPEVFYGSAGPSSSQISGGHGLSITSKQWRRPGTPSLHPYRSQPLYLPPGPAPPSALLSGVALKGQFLDFSTMQATELGKLPAGGVLYPPPSFLYSPAFCPSPLPDTSLLQVRQDLPSPSDFYSTPLQPGGQSGFLPSGAPAQQMLLPMVDSQLPVVNFGSLPPAPPPAPPPLSLLPVGPALQPPSLAVRPPPAPATRVLPSPARPFPASLGRAELHPVELKPFQDYQKLSSNLGGPGSSRTPPTGRSFSGLNSRLKATPSTYSGVFRTQRVDLYQQASPPDALRWIPKPWERTGPPPREGPSRRAEEPGSRGDKEPGLPPPR

SEQ ID NO: 344848 - protein, 2138 aa, Artificial Sequence
  derived and/or modified sequence
MSDRSGPTAKGKDGKKYSSLNLFDTYKGKSLEIQKPAVAPRHGLQSLGKVAIARRMPPPANLPSLKAENKGNDPNVSLVPKDGTGWASKQEQSDPKSSDASTAQPLESQPLPASQTPASNQPKRPPAAPENTPLVPSGVKSWAQASVTHGAHGDGGRASSLLSRFSREEFPTLQAAGDQDKAAKERESAEQSSGPGPSLRPQNSTTWRDGGGRGPDELEGPDSKLHHGHDPRGGLQPSGPPQFPPYRGMMPPFMYPPYLPFPPPYGPQGPYRYPTPDGPSRFPRVAGPRGSGPPMRLVEPVGRPSILKEDNLKEFDQLDQENDDGWAGAHEEVDYTEKLKFSDEEDGRDSDEEGAEGHRDSQSASGEERPPEADGKKGNSPNSEPPTPKTAWAETSRPPETEPGPPAPKPPLPPPGDYPDRGGPPCKPPAPEDEDEAWRQRRKQSSSEISLAVERARRRREEEERRMQEERRAACAEKLKRLDEKFGAPDKRLKAEPAAPPAAPSTPAPPPAVPKELPAPPAPPPASAPTPEKEPEEPAQAPPAQSTPTPGVAAAPTLVSGGGSTSSTSSGSFEASPVEPQLPSKEGPEPPEEVPPPTTPPVPKVEPKGDGIGPTRQPPSQGLGYPKYQKSLPPRFQRQQQEQLLKQQQQHQWQQHQQGSAPPTPVPPSPPQPVTLGAVPAPQAPPPPPKALYPGALGRPPPMPPMNFDPRWMMIPPYVDPRLLQGRPPLDFYPPGVHPSGLVPRERSDSGGSSSEPFDRHAPAMLRERGTPPVDPKLAWVGDVFTATPAEPRPLTSPLRQAADEDDKGMRSETPPVPPPPPYLASYPGFPENGAPGPPISRFPLEEPGPRPLPWPPGSDEVAKIQTPPPKKEPPKEETAQLTGPEAGRKPARGVGSGGQGPPPPRRESRTETRWGPRPGSSRRGIPPEEPGAPPRRAGPIKKPPPPTKVEELPPKPLEQGDETPKPPKPDPLKITKGKLGGPKETPPNGNLSPAPRLRRDYSYERVGPTSCRGRGRGEYFARGRGFRGTYGGRGRGAAGNSAVTESFEEMMGVEVGQGDQTTLLLPEAALPARHGARVQSMRKSPSGAGSGAQKQAARPMRVIWLLQTRRLPHPRREHSPRSRSPTTRSPTFPAPARFTPGVGESSLPEGISPGPRRREPPQVCPGWSPPAKSLAPKKPPTGPLPPSKEPLKEKLIPGPLSPVARGGSNGGSNVGMEDGERPRRRRHGRAQQQDKPPRFRRLKQERENAARGSEGKPSLTLPASAPGPEEALTTVTVAPAPRRAAAKSPDLSNQNSDQANEEWETASESSDFTSERRGDKEAPPPVLLTPKAVGTPGGGGGGAVPGISAMSRGDLSQRAKDLSKRSFSSQRPGMERQNRRPGPGGKAGSSGSSSGGGGGGPGGRTGPGRGDKRSWPSPKNRSRPPEERPPGLPLPPPPPSSSAVFRLDQVIHSNPAGIQQALAQLSSRQGSVTAPGGHPRHKPGPPQAPQGPSPRPPTRYEPQRVNSGLSSDPHFEEPGPMVRGVGGTPRDSAGVSPFPPKRRERPPRKPELLQEESLPPPHSSGFLGSKPEGPGPQAESRDTGTEALTPHIWNRLHTATSRKSYRPSSMEPWMEPLSPFEDVAGTEMSQSDSGVDLSGDSQVSSGPCSQRSSPDGGLKGAAEGPPKRPGGSSPLNAVPCEGPPGSEPPRRPPPAPHDGDRKELPREQPLPPGPIGTERSQRTDRGTEPGPIRPSHRPGPPVQFGTSDKDSDLRLVVGDSLKAEKELTASVTEAIPVSRDWELLPSAAASAEPQSKNLDSGHCVPEPSSSGQRLYPEVFYGSAGPSSSQISGGHGLSITSKQWRRPGTPSLHPYRSQPLYLPPGPAPPSALLSGVALKGQFLDFSTMQATELGKLPAGGVLYPPPSFLYSPAFCPSPLPDTSLLQVRQDLPSPSDFYSTPLQPGGQSGFLPSGAPAQQMLLPMVDSQLPVVNFGSLPPAPPPAPPPLSLLPVGPALQPPSLAVRPPPAPATRVLPSPARPFPASLGRAELHPVELKPFQDYQKLSSNLGGPGSSRTPPTGRSFSGLNSRLKATPSTYSGVFRTQRVDLYQQASPPDALRWIPKPWERTGPPPREGPSRRAEEPGSRGDKEPGLPPPR

SEQ ID NO: 344849 - protein, 561 aa, Artificial Sequence
  derived and/or modified sequence
MTVLEITLAVILTLLGLAILAILLTRWARCKQSEMYISRYSSEQSARLLDYEDGRGSRHAYSTQSGNLCFQRSKRDYTPSTNSLVSMASKFSLGQTELILLLMCFILALSRSSIGSIKCLQTTEEPPSRTAGAMMQFTAPIPGATGPIKLSQKTIVQTPGPIVQYPGSNAGPPSAPRGPPMAPIIISQRTARIPQVHTMDSSGKITLTPVVILTGYMDEELAKKSCSKIQILKCGGTARSQNSREENKEALKNDIIFTNSVESLKSAHIKEPEREGKGTDLEKDKIGMEVKVDSDAGIPKRQETQLKISEMSIPQGQGAQIKKSVSDVPRGQESQVKKSESGVPKGQEAQVTKSGLVVLKGQEAQVEKSEMGVPRRQESQVKKSQSGVSKGQEAQVKKRESVVLKGQEAQVEKSELKVPKGQEGQVEKTEADVPKEQEVQEKKSEAGVLKGPESQVKNTEVSVPETLESQVKKSESGVLKGQEAQEKKESFEDKGNNDKEKERDAEKDPNKKEKGDKNTKGDKGKDKVKGKRESEINGEKSKGSKRAKANTGRKYNKKVEE

SEQ ID NO: 344850 - DNA, 2125 bp, Artificial Sequence
  derived and/or modified sequence
ctgctccacacaatttctcagtgatcctctgcatctctgcctacaagggcctccctgacacccaagttcatattgctcagaaacagtgaacttgagtttttcgttttaccttgatctctctctgacaaagaaatccagatgatgcgagacctgatgaagacaatacatggaaaatgacagtcttggaaataactttggctgtcatcctgactctactgggacttgccatcctggctattttgttaacaagatgggcacgatgtaagcaaagtgaaatgtatatctccagatacagttcagaacaaagtgctagacttctggactatgaggatggtagaggatcccgacatgcatattcaacacaaagtggtaatttatgttttcagagatccaaaagagattacacaccatcaaccaactctctagtgtctatggcatctaagttctccctgggacaaacagaactcattcttcttttgatgtgttttattttagcactgtctcgatcaagtattggtagtataaaatgtttacaaacaactgaagaacctccttccagaactgcaggagccatgatgcaattcacagcccctattcccggagctacaggacctatcaagctctctcaaaaaaccattgtgcaaactccaggacctattgtacaatatcctggatccaatgctggtccaccttcagcaccccgcggtccacccatggcacccataataatttcacagagaaccgcaagaatacctcaagttcacactatggacagttctggaaaaatcacactgactcctgtggttatattaacaggttacatggatgaagaacttgcaaaaaaatcttgttccaaaatccagattctaaaatgtggaggcactgcaaggtctcagaatagccgagaagaaaacaaggaagcactaaagaatgacatcatatttacgaattctgtagaatccttgaaatcagcacacataaaggagccagaaagagaaggaaaaggcactgatttagagaaagacaaaataggaatggaggtcaaggtagacagtgacgctggaataccaaaaagacaggaaacccaactaaaaatcagtgagatgagtataccacaaggacagggagcccaaataaagaaaagtgtgtcagatgtaccaagaggacaggagtcccaagtaaagaagagtgagtcaggtgtcccaaaaggacaagaagcccaagtaacgaagagtgggttggttgtactgaaaggacaggaagcccaggtagagaagagtgagatgggtgtgccaagaagacaggaatcccaagtaaagaagagtcagtctggtgtctcaaagggacaggaagcccaggtaaagaagagggagtcagttgtactgaaaggacaggaagcccaggtagagaagagtgagttgaaggtaccaaaaggacaagaaggccaagtagagaagactgaggcagatgtgccaaaggaacaagaggtccaagaaaagaagagtgaggcaggtgtactgaaaggaccagaatcccaagtaaagaacactgaggtgagtgtaccagaaacactggaatcccaagtaaagaagagtgagtcaggtgtactaaaaggacaggaagcccaagaaaagaaggagagttttgaggataaaggaaataatgataaagaaaaggagagagatgcagagaaagatccaaataaaaaagaaaaaggtgacaaaaacacaaaaggtgacaaaggaaaggacaaagttaaaggaaagagagaatcagaaatcaatggtgaaaaatcaaaaggctcgaaaagggcgaaggcaaatacaggaaggaagtacaacaaaaaagtggaagagtaaggataaattttttaaaggcccataagacaagtgattattatgattcccatactccagatacaaaccatatcccagccattgcctaaacagattacaattataaaatccctttcatcttcatatcacagtttctgctcttcagaagtttcaccctttttaatctctcagccacaaacctcagtttccaaatatttgttttataagttaagacgtatatgattccgtcaagaaagactggatactttctgaagtaaaacattttaatt

SEQ ID NO: 344851 - DNA, 2125 bp, Artificial Sequence
  derived and/or modified sequence
ctgctccacacaatttctcagtgatcctctgcatctctgcctacaagggcctccctgacacccaagttcatattgctcagaaacagtgaacttgagtttttcgttttatcttgatctctctctgacaaagaaatccagatgatgcgagacctgatgaagacaatacatggaaaatgacagtcttggaaataactttggctgtcatcctgactctactgggacttgccatcctggctattttgttaacaagatgggcacgatgtaagcaaagtgaaatgtatatctccagatacagttcagaacaaagtgctagacttctggactatgaggatggtagaggatcccgacatgcatattcaacacaaagtggtaatttatgttttcagagatccaaaagagattacacaccatcaaccaactctctagtgtctatggcatctaagttctccctgggacaaacagaactcattcttcttttgatgtgttttattttagcactgtctcgatcaagtattggtagtataaaatgtttacaaacaactgaagaacctccttccagaactgcaggagccatgatgcaattcacagcccctattcccggagctacaggacctatcaagctctctcaaaaaaccattgtgcaaactccaggacctattgtacaatatcctggatccaatgctggtccaccttcagcaccccgcggtccacccatggcacccataataatttcacagagaaccgcaagaatacctcaagttcacactatggacagttctggaaaaatcacactgactcctgtggttatattaacaggttacatggatgaagaacttgcaaaaaaatcttgttccaaaatccagattctaaaatgtggaggcactgcaaggtctcagaatagccgagaagaaaacaaggaagcactaaagaatgacatcatatttacgaattctgtagaatccttgaaatcagcacacataaaggagccagaaagagaaggaaaaggcactgatttagagaaagacaaaataggaatggaggtcaaggtagacagtgacgctggaataccaaaaagacaggaaacccaactaaaaatcagtgagatgagtataccacaaggacagggagcccaaataaagaaaagtgtgtcagatgtaccaagaggacaggagtcccaagtaaagaagagtgagtcaggtgtcccaaaaggacaagaagcccaagtaacgaagagtgggttggttgtactgaaaggacaggaagcccaggtagagaagagtgagatgggtgtgccaagaagacaggaatcccaagtaaagaagagtcagtctggtgtctcaaagggacaggaagcccaggtaaagaagagggagtcagttgtactgaaaggacaggaagcccaggtagagaagagtgagttgaaggtaccaaaaggacaagaaggccaagtagagaagactgaggcagatgtgccaaaggaacaagaggtccaagaaaagaagagtgaggcaggtgtactgaaaggaccagaatcccaagtaaagaacactgaggtgagtgtaccagaaacactggaatcccaagtaaagaagagtgagtcaggtgtactaaaaggacaggaagcccaagaaaagaaggagagttttgaggataaaggaaataatgataaagaaaaggagagagatgcagagaaagatccaaataaaaaagaaaaaggtgacaaaaacacaaaaggtgacaaaggaaaggacaaagttaaaggaaagagagaatcagaaatcaatggtgaaaaatcaaaaggctcgaaaagggcgaaggcaaatacaggaaggaagtacaacaaaaaagtggaagagtaaggataaattttttaaaggcccataagacaagtgattattatgattcccatactccagatacaaaccatatcccagccattgcctaaacagattacaattataaaatccctttcatcttcatatcacagtttctgctcttcagaagtttcaccctttttaatctctcagccacaaacctcagtttccaaatatttgttttataagttaagacgtatatgattccgtcaagaaagactggatactttctgaagtaaaacattttaatt

SEQ ID NO: 344852 - DNA, 1686 bp, Artificial Sequence
  derived and/or modified sequence
atgaccgtgctggagatcaccctggccgtgatcctgaccctgctgggcctggccatcctggccatcctgctgaccagatgggccagatgcaagcagagcgagatgtacatcagcagatacagcagcgagcagagcgccagactgctggactacgaggacggcagaggcagcagacacgcctacagcacccagagcggcaacctgtgcttccagagaagcaagagagactacacccccagcaccaacagcctggtgagcatggccagcaagttcagcctgggccagaccgagctgatcctgctgctgatgtgcttcatcctggccctgagcagaagcagcatcggcagcatcaagtgcctgcagaccaccgaggagccccccagcagaaccgccggcgccatgatgcagttcaccgcccccatccccggcgccaccggccccatcaagctgagccagaagaccatcgtgcagacccccggccccatcgtgcagtaccccggcagcaacgccggcccccccagcgcccccagaggcccccccatggcccccatcatcatcagccagagaaccgccagaatcccccaggtgcacaccatggacagcagcggcaagatcaccctgacccccgtggtgatcctgaccggctacatggacgaggagctggccaagaagagctgcagcaagatccagatcctgaagtgcggcggcaccgccagaagccagaacagcagagaggagaacaaggaggccctgaagaacgacatcatcttcaccaacagcgtggagagcctgaagagcgcccacatcaaggagcccgagagagagggcaagggcaccgacctggagaaggacaagatcggcatggaggtgaaggtggacagcgacgccggcatccccaagagacaggagacccagctgaagatcagcgagatgagcatcccccagggccagggcgcccagatcaagaagagcgtgagcgacgtgcccagaggccaggagagccaggtgaagaagagcgagagcggcgtgcccaagggccaggaggcccaggtgaccaagagcggcctggtggtgctgaagggccaggaggcccaggtggagaagagcgagatgggcgtgcccagaagacaggagagccaggtgaagaagagccagagcggcgtgagcaagggccaggaggcccaggtgaagaagagagagagcgtggtgctgaagggccaggaggcccaggtggagaagagcgagctgaaggtgcccaagggccaggagggccaggtggagaagaccgaggccgacgtgcccaaggagcaggaggtgcaggagaagaagagcgaggccggcgtgctgaagggccccgagagccaggtgaagaacaccgaggtgagcgtgcccgagaccctggagagccaggtgaagaagagcgagagcggcgtgctgaagggccaggaggcccaggagaagaaggagagcttcgaggacaagggcaacaacgacaaggagaaggagagagacgccgagaaggaccccaacaagaaggagaagggcgacaagaacaccaagggcgacaagggcaaggacaaggtgaagggcaagagagagagcgagatcaacggcgagaagagcaagggcagcaagagagccaaggccaacaccggcagaaagtacaacaagaaggtggaggagtag

SEQ ID NO: 344853 - DNA, 1686 bp, Artificial Sequence
  derived and/or modified sequence
atgaccgttctggagatcaccttggccgtaatcctaacactcttagggctcgccattttggccatcttgcttacgagatgggccaggtgcaagcagagcgagatgtacatctctcgttacagttctgaacaaagtgcgcgactcctggattacgaggacggccggggcagccgccacgcatattccacacagtcaggaaacctgtgtttccagcggtcgaagagagattatacgcccagtacaaacagcttggtgtctatggcatcaaagtttagtctcgggcagaccgagctcattctgctcttgatgtgcttcattctcgccctcagcagatcttccataggctccattaaatgtttacaaacgacggaggagccgcccagccgcaccgctggagccatgatgcagttcacagcccccatccctggggccaccggcccaattaagctgtcccaaaagactattgtccagacccctgggcctatagtccagtatcccgggagtaatgctggaccaccttctgccccccggggaccacctatggcgcctatcatcatttcccagcggacagcccgcatcccgcaagtacatactatggattcaagcggcaagataactctcacacccgtggttatactcacgggatacatggacgaagagctggctaaaaagtcgtgcagcaaaatccagatcctgaagtgtggtggaacagccagatctcagaactctcgggaggaaaataaagaagcactgaagaatgacatcattttcacaaactccgtcgaatctctgaaaagtgctcatataaaagagccagaacgggagggtaagggcactgacctagaaaaagataagatcggcatggaggtgaaagtggacagtgatgccgggataccaaaacgtcaggagactcagcttaagatttctgaaatgtccatcccacaagggcagggcgcccagattaaaaaatcagtgtctgacgtgcccagagggcaagaaagtcaagtcaagaaatccgaatccggggtgccaaaggggcaagaagctcaggtgacaaaatcagggctagtggtcctgaaggggcaagaagcccaggtcgaaaaaagcgagatgggagtgccccgtaggcaggaaagtcaagtgaagaagtcacaatccggagtctccaaaggccaagaggcccaggtcaagaaacgggagtctgtggtgctgaagggccaggaagcgcaggtggaaaaatccgaactaaaagtaccaaagggacaagaagggcaggtggagaaaacagaagccgacgtccccaaagagcaagaggtccaggagaagaaatctgaagctggcgttctgaaaggacccgagagccaggtcaagaatacggaagtcagtgtgccagagaccctggaaagtcaagtcaagaaatccgaaagcggcgtgctgaagggacaggaggcccaggagaagaaagaatcatttgaggataaggggaacaacgacaaggagaaagagcgcgacgcagagaaggatccaaacaaaaaggagaagggcgataagaacactaagggcgacaagggcaaggacaaagtgaaggggaagcgcgaatctgagataaatggcgagaaatctaagggaagtaaacgcgccaaggctaacacaggcaggaaatataataagaaggtagaggaatag

SEQ ID NO: 344854 - DNA, 1686 bp, Artificial Sequence
  derived and/or modified sequence
atgacggttcttgagatcaccctggcagtaattctcacattattgggcctggccattttagcaatactccttacccgatgggctcgatgtaaacagtcggaaatgtatatctcccgctatagctcggagcagtcggctcgcctcttggattacgaagatggaagaggttcgcgccatgcctactccacccagtctggcaatctttgctttcagcgtagcaagcgcgactacacgccatctaccaattctctcgtctcaatggcctctaaattcagcctggggcaaacagaattgatactcttgctaatgtgcttcatactggccttaagtaggtcgtcaattgggtccataaagtgtctccagacgaccgaggagcccccatccaggaccgccggtgcgatgatgcagtttacagcccctatccccggagcaacagggccgatcaagctgtcacagaagaccattgtgcagacacctggaccaatagttcaatacccaggcagtaacgccgggccaccctcagctcccagaggacctccaatggctcccatcatcattagtcagcgaacggctaggatcccacaagtgcataccatggatagttccggtaaaatcactcttacacctgtggtcatcctgaccggctacatggatgaggagctggccaagaaatcatgcagcaagatccagattctcaagtgcggagggaccgctcgctctcagaacagccgggaagagaataaggaggcactgaaaaatgatattatcttcacaaactctgtggagagtctgaagtcagcgcacatcaaggagcctgaacgggaaggtaagggaaccgacctcgaaaaagataagatcgggatggaggttaaggtggactccgatgcggggatacctaaacgccaggaaactcagctgaaaataagcgagatgagcatcccccaaggacaaggggctcagatcaagaaatcagtatctgacgtgcctagaggacaggaatctcaggtgaaaaaaagcgaaagcggggtgccaaaaggccaggaggcacaagttaccaagtctggccttgttgtgctgaaaggccaggaagcccaggttgagaagtccgaaatgggggttcctagaaggcaggaaagccaagtgaaaaagtcccagtctggcgtcagtaaggggcaggaagcccaagtcaagaagcgagagtctgtcgtgctcaaaggtcaggaggcccaggtcgaaaaatcagagttgaaagtccctaagggacaagaaggccaggtggagaagaccgaggctgacgtacctaaagagcaggaggtgcaagagaaaaagtccgaagccggcgtccttaaaggtcctgaaagccaagtcaaaaacaccgaggtttcagtgccagagacactcgagtcacaggtaaagaagtctgaaagtggagtgctgaagggccaggaagcccaagagaagaaagaaagctttgaggacaaagggaataatgataaggagaaggaacgggacgccgaaaaagatccaaataagaaagaaaagggagataaaaacacaaaaggggataagggtaaggacaaagtgaagggtaaacgtgaaagcgaaatcaatggagagaagagtaaaggctcaaagcgggctaaggcaaacaccggccggaagtataacaaaaaagttgaagagtag

SEQ ID NO: 344855 - DNA, 1686 bp, Artificial Sequence
  derived and/or modified sequence
atgacagtgctggagatcaccctggccgtcatcctgaccctgctgggcctggccatcctggccatcctgctgacccgctgggcccgctgcaagcagagcgagatgtacatcagccgctacagcagcgagcagagcgcccggctgctggactatgaagatggccggggcagcagacatgcctacagcacccagagcggcaacctgtgcttccagaggagcaagagggactacacccccagcaccaacagcctggtgtccatggccagcaagttcagcctgggccagacagagctgatcctgctgctgatgtgcttcatcctggccctgagccgcagcagcatcggcagcatcaagtgcctgcagaccacagaggagccccccagcaggacagctggggccatgatgcagttcaccgcccccatccctggggccaccggccccatcaagctgagccagaagaccatcgtgcagaccccaggccccatcgtgcagtacccaggcagcaatgccggcccccccagcgccccccggggcccccccatggcccccatcatcatcagccagaggacagcccgcatcccccaggtgcacaccatggacagcagcggcaagatcaccctgacccctgtggtgatcctgaccggctacatggatgaggagctggccaagaagagctgcagcaagatccagatcctgaagtgtggcggcacagcccggagccagaacagccgggaggagaacaaggaggccctgaagaatgacatcatcttcaccaacagcgtggagagcctgaagagcgcccacatcaaggagcctgagcgggagggcaaaggaacagacctggagaaggacaagattggcatggaggtgaaggtggacagtgatgctggcatccccaagaggcaggagacccagctgaagatcagcgagatgagcatcccccagggccagggcgcccagatcaagaagtctgtgtctgatgtgccccggggccaggagagccaggtgaagaagtctgagagcggcgtgcccaagggccaggaggcccaggtgaccaagagcggcctggtggtgctgaagggccaggaggcccaggtggagaagtctgagatgggcgtgccccggcggcaggagagccaggtgaagaagagccagagcggcgtgtccaagggccaggaggcccaggtgaagaagcgggagagcgtggtgctgaagggccaggaggcccaggtggagaagtctgagctgaaggtgcccaagggccaggagggccaggtggagaagacagaagcagatgtgcccaaggagcaggaggtgcaggagaagaagtctgaggccggcgtgctgaagggccctgagagccaggtgaagaacacagaggtgtctgtgcctgagaccctggagagccaggtgaagaagtctgagagcggcgtgctgaagggccaggaggcccaggagaagaaggagagctttgaggacaagggcaacaatgacaaggagaaggagagagatgctgagaaggaccccaacaagaaggagaagggggacaagaacaccaagggggacaagggcaaggacaaggtgaagggcaagcgggagagcgagatcaatggagagaagagcaagggcagcaagagggccaaggccaacacaggcaggaagtacaacaagaaggtggaggagtag

SEQ ID NO: 344856 - DNA, 1686 bp, Artificial Sequence
  derived and/or modified sequence
atgaccgtgctggagatcaccctggccgtgatcctgaccctgctgggacttgcgatcctcgctattcttctgactcggtgggcccggtgcaagcaaagtgaaatgtacatatccagatacagcagtgaacagagtgccagacttttagactatgaagacggacgaggctcacgccatgcgtactcaacacagtccgggaacttgtgctttcagaggtccaaacgcgattatacaccatctactaactcgttggtatcaatggcctcaaagttctcactcgggcagaccgagttaattctgctgcttatgtgttttatactggccctatcgcgctccagtattgggagcattaagtgtcttcagaccactgaggagcctcccagccgaaccgccggcgctatgatgcagttcactgcaccaatccccggggcaaccggaccaatcaagctctctcagaaaaccattgtgcagacacccggccctatcgtgcaataccctggtagtaacgccggcccaccatctgccccacgcgggccgcctatggcgcccatcattatctcgcagcggaccgcgagaattccccaggtccataccatggattcctcgggaaagatcacccttacaccagtggtcatcctgaccggctacatggatgaggaattggccaaaaaaagctgtagcaagatacagatcctcaaatgcggcggtaccgctcgttcccagaactccagagaagaaaataaggaggccttaaagaatgatatcatctttaccaactccgtcgagagccttaagtctgcacacattaaggaacctgagagggaaggaaaaggaacggatctcgaaaaagataagatcggtatggaagtaaaagtggacagcgatgccggaattcccaaaagacaagagactcaactgaaaatctccgaaatgtccatcccacagggccagggagctcagattaagaagtctgtgagtgatgtgcctcggggccaggaaagtcaggtgaagaagtcagaaagtggagtcccaaaaggccaagaagctcaggtgactaaatctggtctggtagttcttaagggccaggaggctcaggtagaaaagtccgaaatgggtgtcccaagaagacaggagtcccaggtgaagaaaagtcagtctggtgtgagcaaaggccaagaagcacaagtaaaaaagcgcgagtctgttgtgcttaagggtcaggaggcacaggttgaaaaatcagagctgaaggtaccaaaggggcaggagggtcaggtagagaagaccgaggcagacgtgcccaaagaacaggaggtccaggagaagaaaagcgaagccggtgtgttaaaaggccccgagtcacaggtgaagaacaccgaggtatctgtgccggagaccctcgagagccaggtgaagaagtctgaatctggggtgctgaagggccaagaggcacaggagaaaaaagaatctttcgaggacaaggggaacaacgataaggaaaaagagagggatgccgagaaagatcctaataagaaggagaaaggggacaaaaataccaaaggagacaagggcaaagataaagtgaaaggaaaaagggagtccgaaattaacggtgaaaaaagcaagggatccaagcgggcaaaggccaacactgggagaaagtacaataagaaagtggaagaatag

SEQ ID NO: 344857 - DNA, 1686 bp, Artificial Sequence
  derived and/or modified sequence
atgaccgtgctggagatcaccctggccgtgatcctgaccctgctgggtttagctatcctcgctatattgctgacacgctgggcacggtgtaaacaatctgagatgtacatttcacggtactcatccgaacagtcagctcggctgctggactatgaagatggacgagggtctcggcacgcttattccacccagagcggcaatctgtgttttcagagatctaagcgggactacaccccctcaactaatagcctcgttagcatggcctccaagtttagtctgggacagacggagttgatcctcttactcatgtgttttatcttggccctcagtaggtccagcattggcagcatcaagtgtctgcagaccactgaagagcccccttcaaggacggcgggcgccatgatgcaatttacggcacccattcccggggcaaccggtcccattaaactgtcccagaaaacaatcgtgcagacccctgggcccatcgtccagtatccaggttccaacgcgggcccccctagcgctcctcggggtccccccatggcaccgatcatcatcagccaaaggacagctagaatcccacaggtgcatacaatggattctagtggtaagattaccctgacacccgtggttattctgacaggctatatggatgaggagctagccaagaagagttgtagcaaaatccagatcttgaaatgcggtggaacagctcggagtcagaactccagagaggagaacaaggaggccctgaagaatgatatcattttcactaatagcgtcgaaagcctgaagtcagctcacataaaagaacccgagcgggaaggaaaaggaaccgacttggagaaggacaaaataggtatggaggttaaggtcgatagtgacgcaggaatccccaaaagacaggagacccaactcaagatctccgaaatgagtatccctcaggggcagggcgcacaaattaagaaaagcgtctccgatgtgcctcgagggcaggagagccaggtgaaaaagagtgaatctggcgtcccaaagggccaggaggcccaggtaaccaagagtgggttggttgtcttgaaaggccaggaggcgcaggtggagaaatcagagatgggtgtgccgagaaggcaggagagccaggtaaagaagagtcagagtggggtcagcaagggccaggaagcacaagttaagaagagagagagcgtggtactcaaaggccaagaagcgcaagtagagaaatcggagctcaaagtgccaaagggccaggaggggcaggtggaaaagactgaggctgatgtgcctaaagaacaggaggttcaagagaaaaagtccgaagctggtgttttgaagggcccagaatcacaggtcaaaaacacagaagtctcagtccccgagaccctggagagccaggtcaagaagagcgagtctggggtgctcaaaggccaggaagcgcaggagaagaaagagtcatttgaagacaaaggcaacaatgacaaggagaaagaacgggatgccgagaaagatcctaataagaaggaaaaaggcgacaagaatacaaagggagacaaagggaaagacaaagtgaagggcaagagggagtccgaaataaatggtgagaaatctaagggctccaagagggctaaggccaacaccggacgaaagtataacaaaaaggtggaggaatag

SEQ ID NO: 344858 - DNA, 1686 bp, Artificial Sequence
  derived and/or modified sequence
atgacggtacttgaaattactcttgctgtgatactgaccctgctgggcttggcgatcttggcaatattgctgacccgctgggccagatgcaaacagagcgaaatgtacatctcgagatacagctctgagcaaagtgcacgccttctggactacgaggacggtcgcggaagcaggcacgcctatagtactcagtctgggaacttgtgcttccagcggtcaaagcgggactataccccttcaacgaactctcttgtgtcaatggccagcaagttctccctgggtcagacggaactcattttgctgctgatgtgcttcattctggccctgtcccgctcatccatcgggtctattaaatgtctgcagaccaccgaggagccaccttcgaggacagcaggagccatgatgcagttcaccgctccaatccctggggcaaccggaccaattaagctctcacagaaaaccatagtgcagacacccggacccattgtgcaatatcctggttccaatgcgggtcctccttctgctcccagggggccacctatggcaccaataatcatcagccaacggacagccagaattccacaggtacacacaatggattcatcagggaaaataactctgaccccagtcgtgatactcacaggctatatggatgaggagcttgccaagaagtcatgcagtaaaatccagattctcaagtgtggcggaaccgctagaagtcaaaatagccgcgaggagaacaaagaggccctcaagaacgatattattttcactaactcagtggaatctctgaaaagtgcacacatcaaggagccggaacgggaggggaaaggcaccgatctggagaaagacaaaataggtatggaagtcaaggtggatagcgatgccggtatcccaaagcggcaggaaactcagctgaagatttcggaaatgagcatccctcaagggcagggcgctcagattaagaaaagcgtgagtgacgtccctcgaggtcaggaatcccaggtgaaaaagagtgagtcaggggtaccaaaaggacaggaagcccaagtgaccaaatctggacttgtggtactgaaaggacaggaggcccaggtggaaaaatccgagatgggcgtgcccaggcgtcaggagagccaggtgaagaagtcgcaaagcggggtatccaagggacaggaggcacaggtgaaaaaacgggagtcagtagtcctcaagggccaggaagcacaagtggaaaaatctgaactgaaggtccctaagggccaggaggggcaggtagaaaagacagaagccgacgtacccaaggagcaggaagtgcaggaaaagaagagtgaagccggtgttttaaaaggaccagagtcacaggtcaagaacaccgaagtaagcgttccagagactttagagtcccaagtgaagaagtccgaatccggggtgctgaagggacaggaggcccaagagaaaaaagaaagctttgaagataagggaaacaacgataaggagaaggaaagggacgccgaaaaagacccgaacaaaaaggagaagggtgataaaaataccaaaggggacaaaggcaaggataaagttaaaggcaaacgcgaatccgagattaacggggaaaagagtaagggatctaagagggccaaggctaacaccgggagaaaatacaataaaaaggtggaagagtag

SEQ ID NO: 344859 - DNA, 1686 bp, Artificial Sequence
  derived and/or modified sequence
atgaccgtgttggagattaccctcgctgtgatcctgaccctgcttggcctcgctatcttagccatcctgctgactcggtgggctaggtgcaagcagtctgagatgtacatctcccggtacagcagtgagcagtctgctaggctcctggactatgaagatgggagaggttctaggcatgcatatagtactcaaagtggaaacttatgcttccagaggtccaagcgggattacacaccgagcacaaattccctcgtgagtatggcgtcaaagttttctctcgggcagaccgaactgatccttctcctgatgtgttttatattagccctcagcaggtcctcaatcggctccatcaagtgtttgcagacaaccgaggaaccaccctccagaaccgcaggagctatgatgcagtttacggcccctattcccggagctactggcccaattaagttatcccagaaaactatagtccagactcctggaccgatcgtgcagtatcctgggagtaacgctggcccaccgtctgcccctcgtggcccaccaatggctcccatcattattagtcagcgtaccgcaagaatccctcaagtgcacacaatggattcctcgggcaagatcacacttactcctgtggtgatcctcaccggctacatggacgaggagctggccaagaagtcttgtagcaagattcagatcctcaagtgcggaggaacggcacggagccagaactcccgagaagaaaataaagaggctttgaagaacgacatcatttttaccaacagcgtggagtcactgaagtctgctcacatcaaggagcctgagcgcgaaggcaaaggaacagacctcgaaaaggataaaatcggtatggaagtcaaggtggactcagacgctggcatccctaaaagacaggaaacacaactgaaaataagcgaaatgagtatcccgcaagggcagggcgcacagatcaagaagtcggtgtctgacgtccccagaggccaagagtctcaagtgaagaagtcagaatccggggtccccaagggccaggaggctcaggtaaccaagtccggcctcgtggtgcttaagggtcaggaggcccaggtcgaaaaatcggaaatgggtgtgcccagaagacaggagtcccaggtgaaaaaaagccagagtggcgttagcaaggggcaagaagctcaggttaagaagcgggagtcagtcgtcctgaagggtcaagaagctcaggttgaaaagtcagaactgaaggtccctaaagggcaggaagggcaggttgagaagaccgaggctgacgtgcctaaagagcaggaagtccaggaaaaaaagagcgaggccggtgtgcttaaggggcctgagtcgcaggtgaagaataccgaggtctccgtgccggagactttagaatcacaggtgaagaagagcgagtccggcgtgctaaagggtcaggaagcgcaggagaaaaaagagtcctttgaggacaaagggaacaatgataaggaaaaggagcgtgacgccgagaaagatccaaataaaaaagaaaagggggataaaaacacaaagggagataaaggcaaggataaagtgaaggggaagcgggagagtgagatcaacggggaaaagtctaaaggatctaaaagggccaaggctaataccggcagaaaatataacaaaaaggtggaagagtag

SEQ ID NO: 344860 - DNA, 1737 bp, Artificial Sequence
  derived and/or modified sequence
atgctgctgctgctgctgctggcccccctgttcctgagaccccccggcgccggcggcgtgcagacccccaacgccaccagcgagggctgccagatcatccaccccccctgggagggcggcatcagatacagaggcctgaccagagaccaggtgaaggccatcaacttcctgcccgtggactacgagatcgagtacgtgtgcagaggcgagagagaggtggtgggccccaaggtgagaaagtgcctggccaacggcagctggaccgacatggacacccccagcagatgcgtgagaatctgcagcaagagctacctgaccctggagaacggcaaggtgttcctgaccggcggcgacctgcccgccctggacggcgccagagtggacttcagatgcgaccccgacttccacctggtgggcagcagcagaagcatctgcagccagggccagtggagcacccccaagccccactgccaggtgaacagaaccccccacagcgagagaagagccgtgtacatcggcgccctgttccccatgagcggcggctggcccggcggccaggcctgccagcccgccgtggagatggccctggaggacgtgaacagcagaagagacatcctgcccgactacgagctgaagctgatccaccacgacagcaagtgcgaccccggccaggccaccaagtacctgtacgagctgctgtacaacgaccccatcaagatcatcctgatgcccggctgcagcagcgtgagcaccctggtggccgaggccgccagaatgtggaacctgatcgtgctgagctacggcagcagcagccccgccctgagcaacagacagagattccccaccttcttcagaacccaccccagcgccaccctgcacaaccccaccagagtgaagctgttcgagaagtggggctggaagaagatcgccaccatccagcagaccaccgaggtgttcaccagcaccctggacgacctggaggagagagtgaaggaggccggcatcgagatcaccttcagacagagcttcttcagcgaccccgccgtgcccgtgaagaacctgaagagacaggacgccagaatcatcgtgggcctgttctacgagaccgaggccagaaaggtgttctgcgaggtgtacaaggagagactgttcggcaagaagtacgtgtggttcctgatcggctggtacgccgacaactggttcaagatctacgaccccagcatcaactgcaccgtggacgagatgaccgaggccgtggagggccacatcaccaccgagatcgtgatgctgaaccccgccaacaccagaagcatcagcaacatgaccagccaggagttcgtggagaagctgaccaagagactgaagagacaccccgaggagaccggcggcttccaggaggcccccctggcctacgacgccatctgggccctggccctggccctgaacaagaccagcggcggcggcggcagaagcggcgtgagactggaggacttcaactacaacaaccagaccatcaccgaccagatctacagagccatgaacagcagcagcttcgagggcgtgagcggccacgtggtgttcgacgccagcggcagcagaatggcctggaccctgatcgagcagctgcagggcggcagctacaagaagatcggctactacgacagcaccaaggacgacctgagctggagcaagaccgacaagtggatcgtgatcagcagaacccacagccccacctag

SEQ ID NO: 344861 - DNA, 4385 bp, Artificial Sequence
  derived and/or modified sequence
ccctctcttccccccgccctgccttcccttgcaccctccttcttccctccgcccgggagctctccctggtccccggcgccgcctccttccctcccggctccccgctccccgctcccgtggctgccgccgccccggggaagaagagacaggggtggggtttgggggaagcgagagaggaggggagagaccctggccaggctggagcctggattcgaggggaggagggacgggaggaggagaaaggtggaggagaagggaggggggagcggggaggagcggccgggcctggggccttgaggcccggggagagccggggagccgggcccgcgcgccgagatgttgctgctgctgctactggcgccactcttcctccgccccccgggcgcgggcggggtgcagacccccaacgccacctcagaaggttgccagatcatacacccgccctgggaagggggcatcaggtaccggggcctgactcgggaccaggtgaaggctatcaacttcctgccagtggactatgagattgagtatgtgtgccggggggagcgcgaggtggtggggcccaaggtccgcaagtgcctggccaacggctcctggacagatatggacacacccagccgctgtgtccgaatctgctccaagtcttatttgaccctggaaaatgggaaggttttcctgacgggtggggacctcccagctctggacggagcccgggtggatttccggtgtgaccccgacttccatctggtgggcagctcccggagcatctgtagtcagggccagtggagcacccccaagccccactgccaggtgaatcgaacgccacactcagaacggcgcgcagtgtacatcggggcactgtttcccatgagcgggggctggccagggggccaggcctgccagcccgcggtggagatggcgctggaggacgtgaatagccgcagggacatcctgccggactatgagctcaagctcatccaccacgacagcaagtgtgatccaggccaagccaccaagtacctatatgagctgctctacaacgaccctatcaagatcatccttatgcctggctgcagctctgtctccacgctggtggctgaggctgctaggatgtggaacctcattgtgctttcctatggctccagctcaccagccctgtcaaaccggcagcgtttccccactttcttccgaacgcacccatcagccacactccacaaccctacccgcgtgaaactctttgaaaagtggggctggaagaagattgctaccatccagcagaccactgaggtcttcacttcgactctggacgacctggaggaacgagtgaaggaggctggaattgagattactttccgccagagtttcttctcagatccagctgtgcccgtcaaaaacctgaagcgccaggatgcccgaatcatcgtgggacttttctatgagactgaagcccggaaagttttttgtgaggtgtacaaggagcgtctctttgggaagaagtacgtctggttcctcattgggtggtatgctgacaattggttcaagatctacgacccttctatcaactgcacagtggatgagatgactgaggcggtggagggccacatcacaactgagattgtcatgctgaatcctgccaatacccgcagcatttccaacatgacatcccaggaatttgtggagaaactaaccaagcgactgaaaagacaccctgaggagacaggaggcttccaggaggcaccgctggcctatgatgccatctgggccttggcactggccctgaacaagacatctggaggaggcggccgttccggcgtgcgcctggaggacttcaactacaacaaccagaccattaccgaccaaatctaccgggcaatgaactcctcgtcctttgagggtgtctctggccatgtggtgtttgatgccagcggctctcggatggcatggacgcttatcgagcagcttcagggtggcagctacaagaagattggctactatgacagcaccaaggatgatctttcctggtccaaaacagataaatggattgttatatccagaactcacagcccaacctgaacaacctgactgctgtgggctgctcactggctttagctgctgtcttccccctggggctcgatggttaccacattgggaggaaccagttccctttcgtctgccaggcccgcctctggctcctgggcctgggctttagtctgggctacggttccatgttcaccaagatttggtgggtccacacggtcttcacaaagaaggaagaaaagaaggagtggaggaagactctggaaccctggaagctgtatgccacagtgggcctgctggtgggcatggatgtcctcactctcgccatctggcagatcgtggaccctctgcaccggaccattgagacatttgccaaggaggaacctaaggaagatattgacgtctctattctgccccagctggagcattgcagctccaggaagatgaatacatggcttggcattttctatggttacaaggggctgctgctgctgctgggaatcttccttgcttatgagaccaagagtgtgtccactgagaagatcaatgatcaccgggctgtgggcatggctatctacaatgtggcagtcctgtgcctcatcactgctcctgtcaccatgattctgtccagccagcaggatgcagcctttgcctttgcctctcttgccatagttttctcctcctatatcactcttgttgtgctctttgtgcccaagatgcgcaggctgatcacccgaggggaatggcagtcggaggcgcaggacaccatgaagacagggtcatcgaccaacaacaacgaggaggagaagtcccggctgttggagaaggagaaccgtgaactggaaaagatcattgctgagaaagaggagcgtgtctctgaactgcgccatcaactccagtctcggcagcagctccgctcccggcgccacccaccgacacccccagaaccctctgggggcctgcccaggggaccccctgagccccccgaccggcttagctgtgatgggagtcgagtgcatttgctttataagtgagggtagggtgagggaggacaggccagtagggggagggaaagggagaggggaagggcaggggactcaggaagcagggggtccccatccccagctgggaagaacatgctatccaatctcatctcttgtaaatacatgtccccctgtgagttctgggctgatttgggtctctcatacctctgggaaacagacctttttctctcttactgcttcatgtaattttgtatcacctcttcacaatttagttcgtacctggcttgaagctgctcactgctcacacgctgcctcctcagcagcctcactgcatctttctcttcccatgcaacaccctcttctagttaccacggcaacccctgcagctcctctgcctttgtgctctgttcctgtccagcaggggtctcccaacaagtgctctttccaccccaaaggggcctctccttttctccactgtcataatctctttccatcttacttgcccttctatactttctcacatgtggctccccctgaattttgcttcctttgggagctcattcttttcgccaaggctcacatgctccttgcctctgctctgtgcactcacgctcagcacacatgcatcctcccctctcctgcgtgtgcccactgaacatgctcatgtgtacacacgcttttcccatatgctttcttcatgttcagtcacatgtgctctcgggtgccctgcattcacagctacgtgtgcccctctcatggtcatgggtctgcccttgagcgtgtttgggtaggcatgtgcaatttgtctagcatgctgagtcatgtctttcctatttgcacacgtccatgtttatccatgtactttccctgtgtaccctccatgtaccttgtgtactttcttcccttaaatcatggtattcttctgacagagccatatgtaccctaccctgcacattgttatgcacttttccccaattcatgtttggtggggccatccacaccctctccttgtcacagaatctccatttctgctcagattccccccatctccattgcattcatgtactaccctcagtctacactcacaatcatcttctcccaagactgctcccttttgttttgtgtttttttgaggggaattaaggaaaaataagtgggggcaggtttggagagctgcttccagtggatagttgatgagaatcctgaccaaaggaaggcacccttgactgttgggatagacagatggacctatggggtgggaggtggtgtccctttcacactgtggtgtctcttggggaaggatctccccgaatctcaataaaccagtgaacagtgtgactcggc

SEQ ID NO: 344862 - DNA, 1737 bp, Artificial Sequence
  derived and/or modified sequence
atgttgttgttgctcctgctggcccccctttttcttcggccacccggcgctgggggcgtccagactcctaacgcaaccagcgagggctgtcagatcattcatccaccctgggaaggcggcattcgctatcgggggctgactcgcgatcaggtgaaggccatcaactttctaccggtggactatgagatcgagtatgtgtgtcgtggcgagcgcgaggtcgttggcccgaaagtcagaaagtgtttggccaatggatcgtggacagacatggataccccttcccgttgcgtcaggatttgctccaaatcctatttgacactcgagaatgggaaagtgtttcttaccggaggggatctgcccgctctggatggggcccgtgtagatttcaggtgtgatccggattttcatttggtcggtagttcacgttcgatctgcagtcagggccaatggtccacccccaagccgcattgtcaggttaatcggaccccccattcagagcgacgagcagtctatattggggccctttttcccatgtctgggggctggcctgggggacaggcatgtcagcccgcagtggagatggccttagaagacgtgaactcacgccgcgacattctacccgactacgaactcaagctgatacaccatgactcgaagtgtgaccccggccaggcaaccaaatatttatacgagctgctctacaacgaccctattaagataattcttatgccggggtgttccagcgtgtctaccctggtcgcagaagccgcaagaatgtggaacctcatcgtcctgtcttacggaagtagttcccctgcactcagcaacagacagcggtttcctacattctttagaactcatccatctgcaacactacacaatccaacccgggttaagcttttcgaaaaatggggctggaagaagattgcaaccatccagcagaccactgaggttttcacgagtactttagacgacctcgaggaaagagtaaaagaggcgggcatagaaatcactttcaggcagagctttttcagcgaccccgctgtgcctgttaagaacctcaagagacaggacgcgcgcatcattgtgggcttgttttatgagaccgaggccaggaaggtgttttgcgaagtctacaaggaaaggctgtttggcaagaaatacgtgtggttccttatcggttggtacgctgataattggtttaaaatatatgaccctagtataaattgcaccgtggatgaaatgactgaagctgtagaagggcatattacaactgagatagtgatgttgaatccagccaacaccagatccatttctaacatgacttcccaagagtttgtagagaagctcacgaaacgattgaaacggcatcccgaggagaccggggggttccaggaagcgccactcgcttatgacgctatttgggccctcgccttggcgctgaataaaacctctggaggtgggggtaggagcggggttaggcttgaggatttcaactataacaaccagaccatcactgaccagatctatcgggctatgaacagtagtagttttgaaggcgtctctggacatgtggtcttcgatgcctcaggttcgcgcatggcatggacactgattgagcagttgcagggcggaagctataagaaaattggatactacgacagcacaaaggacgacttgagctggagcaagactgataagtggatcgtgataagtcggacacactctccgacatag

SEQ ID NO: 344863 - DNA, 1737 bp, Artificial Sequence
  derived and/or modified sequence
atgctgctgctgctgctgctggcccccctcttcctgcggcccccaggagctggaggagtgcagaccccaaatgccaccagcgagggctgccagatcatccaccccccctgggagggcggcatccgctaccggggcctgacccgggaccaggtgaaggccatcaacttcctgcctgtggactatgaaattgaatatgtgtgccgcggggagcgggaggtggtgggccccaaggtgaggaagtgcctggccaacggctcctggacagacatggacacccccagccgctgtgtgcgcatctgcagcaagagctacctgaccctggagaatggcaaggtgttcctgactggaggagacctgcctgccctggatggagcccgggtggacttccgctgtgaccctgacttccacctggtgggcagcagccgcagcatctgcagccagggccagtggagcacccccaagccccactgccaggtgaacagaacaccccacagcgagaggagagctgtgtacatcggggccctcttccccatgtctgggggctggccaggcggccaggcctgccagcctgctgtggagatggccctggaggatgtgaacagccggcgggacatcctgcctgactatgagctgaagctgatccaccacgacagcaaatgtgaccccggccaggccaccaagtacctgtatgagctgctgtacaatgaccccatcaagatcatcctgatgcctggctgcagctctgtgtccaccctggtggccgaggccgccaggatgtggaacctgattgtgctgtcctatggcagcagcagccctgccctgagcaaccggcagcgcttccccaccttcttccgcacccaccccagcgccaccctgcacaaccccaccagggtgaagctgtttgagaagtggggctggaagaagatcgccaccatccagcagaccacagaggtgttcaccagcaccctggatgacctggaggagcgggtgaaggaggccggcatcgagatcaccttccggcagagcttcttcagtgaccctgctgtgcctgtgaagaacctgaagaggcaggatgcccgcatcatcgtgggcctcttctatgaaacagaggccaggaaggtgttctgtgaggtgtacaaggagcggctgtttgggaagaagtatgtgtggttcctgattggctggtatgctgacaactggttcaagatctatgaccccagcatcaactgcaccgtggatgagatgacagaggccgtggagggccacatcaccacagaaattgtgatgctgaacccagccaacaccaggagcatcagcaacatgaccagccaggagtttgtggagaagctgaccaagaggctgaagaggcaccctgaggagactggaggcttccaggaggcccccctggcctatgatgccatctgggccctggccctggccctgaacaagaccagcggcggcggcggccgctctggagtgcggctggaggacttcaactacaacaaccagaccatcacagaccagatctaccgggccatgaacagcagcagctttgagggcgtgtctggccacgtggtgtttgatgccagcggcagcaggatggcctggaccctgattgagcagctgcagggcggcagctacaagaagattggctactatgacagcaccaaggatgacctgtcctggagcaagacagacaagtggatcgtcatcagcaggacccacagccccacctag

SEQ ID NO: 344864 - DNA, 1737 bp, Artificial Sequence
  derived and/or modified sequence
atgctgctgctgctgctgctggcccccctgttcctgcggccccccggtgccggcggggttcagactccaaatgccacaagtgaggggtgccagatcatccatccaccttgggaaggcggcattcgctacagaggcctcactagagaccaggtgaaggcgataaacttcctgcccgtggactatgagatcgaatatgtgtgtaggggtgaaagagaagtcgttgggcctaaagtccgtaagtgtctggccaatgggtcttggacagatatggacaccccttctcgctgcgtaaggatttgttctaaaagttacctgacactggagaacggaaaagtcttcctaaccggcggcgatctacctgcgcttgacggagcaagagtcgatttcaggtgcgatccggactttcatcttgtcggatctagccggagtatctgcagtcaaggtcagtggtccaccccaaagccccattgccaagttaacagaacaccacattccgagcgacgggccgtttacatcggagccctttttccgatgtctgggggttggcccggcggccaggcatgccagcccgccgtcgaaatggccctggaagacgtcaatagcaggcgcgacatactgccagattatgagcttaaacttattcaccatgacagcaagtgcgatccaggccaagcaacaaaatatctttacgaactactttataacgaccctatcaaaattatcctcatgcccggctgctcttctgtgtcgactctcgtggcagaggccgcgcgtatgtggaatttgatcgtcctgtcatacggaagcagttctcctgccttgtcaaaccgtcagagatttcccactttctttcgaacccacccctccgccactctgcacaaccctacgcgcgttaagctgttcgagaagtggggctggaaaaaaatagccaccattcagcaaactaccgaggtcttcaccagcactctggatgatcttgaggaaagagtgaaggaggctggtatagaaattaccttccgccagtccttttttagcgaccctgccgtccccgtgaagaacctaaagcgccaggacgctaggattatcgtcggcctcttttatgaaaccgaggcccgcaaagttttttgcgaggtttacaaagagagactgttcgggaagaaatatgtgtggttcctaatcggttggtacgctgataattggtttaaaatttacgatccctcaatcaattgcacagtggatgaaatgacagaggccgttgaggggcacatcacaacagagattgtcatgctgaatcccgctaatactcggagcatatccaacatgactagtcaggagttcgtggagaaactgactaaacgtttaaaacgacaccctgaggagactgggggtttccaggaagctcccctggcctatgatgcaatttgggccttagcactggcacttaacaaaacctccggcggcggaggcagatctggagtgaggctggaggactttaattacaataaccagaccattaccgatcagatatatagggccatgaattctagctcttttgaaggagtgagtggacacgtagtctttgacgcgtctggtagccggatggcttggacattgattgagcagctgcagggagggagctataagaagatcggttactatgatagcaccaaggatgacctgagctggtcaaagacagataagtggatcgtcataagtcgtactcattctccaacctag

SEQ ID NO: 344865 - DNA, 1737 bp, Artificial Sequence
  derived and/or modified sequence
atgctcctcctgttactgctggccccactgttcttacgccctccaggtgcgggtggtgtccaaacacctaatgccacctccgagggctgtcagatcattcatccaccttgggagggcggaatacgatacaggggccttacacgagaccaggtgaaggccatcaactttctgcccgtagactatgagattgaatatgtctgtagaggagagcgcgaggtggtgggtccaaaagtacgtaaatgtctcgcaaatggttcctggactgacatggacacccccagccggtgcgttcggatctgctccaagtcgtatttaaccttagaaaacggcaaggtatttctgactgggggagacctgcctgcactcgatggagccagagtggatttcagatgcgaccctgattttcatttggtggggtcttctagaagcatttgtagtcaaggtcagtggagcacaccgaagccccactgccaggtcaatagaaccccccatagtgagaggcgcgctgtgtacatcggagccctgttcccaatgagtggcggatggcctggtggtcaggcttgtcagcccgctgttgagatggctctggaagatgtgaattcccggcgagacatcctgcctgactacgagctgaagcttatacaccatgattccaagtgcgaccctggacaagccaccaaatatctgtacgaattactgtacaacgatccgatcaagatcatactgatgcctgggtgcagcagcgtaagtaccctggtagcagaggccgcaagaatgtggaatctgatcgtactttcctatggaagctcctcccccgctttgtccaatcggcagcgctttcccacgttttttcgcacccacccgtctgctaccctgcacaatccgacacgggtgaagctctttgagaagtgggggtggaaaaagatcgctactattcagcagaccacggaggttttcacctctacccttgacgatctcgaggaacgcgttaaagaggcgggtatcgagatcacctttcgccaatcttttttctcagaccctgccgtgcccgtgaagaacttaaagcggcaagatgccagaatcatcgtgggcctgttctatgaaaccgaggcaagaaaggtgttctgtgaggtctataaagagagacttttcgggaagaagtacgtatggttcctcatagggtggtatgccgacaattggttcaagatttatgatcccagtattaactgtacagtggatgagatgaccgaggctgtcgaaggacatatcacgacagagattgtgatgctgaacccagccaacaccagaagcattagcaatatgacttctcaggaattcgtggaaaaactcaccaagaggttaaaacggcatccagaagaaactggcggtttccaggaagcccctttagcctatgatgcaatttgggctcttgccctcgccctgaataagacaagcggtggaggtggacggtcaggggtgaggctggaggactttaactacaataaccagacaattacagaccagatatacagggccatgaacagctcctcattcgagggcgtttccggccatgttgtgttcgatgcatccggctcccggatggcctggaccctcattgagcaattgcagggtgggtcgtataagaagattggctattatgattcgaccaaagatgacctcagctggtctaaaaccgataaatggattgtgatcagtaggacccactcaccgacatag

SEQ ID NO: 344866 - protein, 362 aa, Artificial Sequence
  derived and/or modified sequence
MRVTAPRTLLLLLWGAVALTETWAGSHSMRYFYTAMSRPGRGEPRFITVGYVDDTLFVRFDSDATSPRKEPRAPWIEQEGPEYWDRETQISKTNTQTYRENLRTALRYYNQSEAGSHIIQRMYGCDVGPDGRLLRGYDQDAYDGKDYIALNEDLSSWTAADTAAQITQRKWEAARVAEQDRAYLEGLCVESLRRYLENGKETLQRADPPKTHVTHHPISDHEVTLRCWALGFYPAEITLTWQRDGEDQTQDTELVETRPAGDRTFQKWAAVVVPSGEEQRYTCHVQHEGLPKPLTLRWEPSSQSTVPIVGIVAGLAVLAVVVIGAVVAAVMCRRKSSGGKGGSYSQAACSDSAQGSDVSLTA

SEQ ID NO: 344867 - protein, 362 aa, Artificial Sequence
  derived and/or modified sequence
MRVTAPRTLLLLLWGAVALTETWAGSHSMRYFYTAMSRPGRGEPRFITVGYVDDTLFVRFDSDATSPRKEPRAPWIEQEGPEYWDRETQISKTNTQTYRENLRTALRYYNQSEAGSHIIQRMYGCDVGPDGRLLRGYDQDAYDGKDYIALNEDLSSWTAADTAAQITQRKWEAARVAEQLRAYLEGLCVESLRRYLENGKETLQRADPPKTHVTHHPISDHEVTLRCWALGFYPAEITLTWQRDGEDQTQDTELVETRPAGDRTFQKWAAVVVPSGEEQRYTCHVQHEGLPKPLTLRWEPSSQSTVPIVGIVAGLAVLAVVVIGAVVAAVMCRRKSSGGKGGSYSQAACSDSAQGSDVSLTA

SEQ ID NO: 344868 - protein, 224 aa, Artificial Sequence
  derived and/or modified sequence
MRVTAPRTLLLLLWGAVALTETWAGSHSMRYFYTAMSRPGRGEPRFITVGYVDDTLFVRFDSDATSPRKEPRAPWIEQEGPEYWDRETQISKTNTQTYRENLRTALRYYNQSEAGSHIIQRMYGCDVGPDGRLLRGYDQDAYDGKDYIALNEDLSSWTAADTAAQITQRKWEAARVAEQLRAYLEGLCVESLRRYLENGKETLQRADQEQKSLFPAQRLELSNE

SEQ ID NO: 344869 - protein, 397 aa, Artificial Sequence
  derived and/or modified sequence
MRVMAPRTLILLLSGALALTETWACSHSMRYFYTAVSRPGRGEPRFIAVGYVDDTQFVQFDSDAASPRGEPRAPWVEQEGPEYWDRETQKYKRQAQTDRVNLRKLRGYYNQSEAGSHTLQRMYGCDLGPDGRLLRGYNQFAYDGKDYIALNEDLRSWTAADKAAQITQRKWEAAREAEQRRAYLEGTCVEWLRRYLENGKKTLQRAEHPKTHVTHHPVSDHEATLRCWALGFYPAEITLTWQRDGEDQTQDTELVETRPAGDGTFQKWAAVVVPSGEEQRYTCHVQHEGLPEPLTLRWGPSSQPTIPIVGIVAGLAVLAVLAVLGAVMAVVMCRRKSSGREGVRSGVWPATVPRALMSLSSLVKPETAACVGLRCRISSHLSFVTSRASGISFCKGI

SEQ ID NO: 344870 - DNA, 1008 bp, Artificial Sequence
  derived and/or modified sequence
agatgcgggtcacggcgccccgaaccctcctcctgctgctctggggggcagtggccctgaccgagacctgggccggctcccactccatgaggtatttctacaccgccatgtcccggcccggccgcggggagccccgcttcatcaccgtgggctacgtggacgacacgctgttcgtgaggttcgacagcgacgccacgagtccgaggaaggagccgcgggcgccatggatagagcaggaggggccggagtattgggaccgggagacacagatctccaagaccaacacacagacttaccgagagaacctgcgcaccgcgctccgctactacaaccagagcgaggccgggtctcacatcatccagaggatgtacggctgcgacgtggggccggacgggcgcctcctccgcgggtatgaccaggacgcctacgacggcaaggattacatcgccctgaacgaggacctgagctcctggaccgcggcggacaccgcggctcagatcacccagcgcaagtgggaggcggcccgtgtggcggagcagctgagagcctacctggagggcctgtgcgtggagtcgctccgcagatacctggagaacgggaaggagacgctgcagcgcgcggatcaggagcagaagtccctgttccccgctcagagactcgaactttccaatgaataggagattatcccagaccccccaaagacacatgtgacccaccaccccatctctgaccatgaggtcaccctgaggtgctgggccctgggcttctaccctgcggagatcacactgacctggcagcgggatggcgaggaccaaactcaggacaccgagcttgtggagaccagaccagcaggagatagaaccttccagaagtgggcagctgtggtggtgccttctggagaagagcagagatacacatgccatgtacagcatgaggggctgccgaagcccctcaccctgagatgggagccgtcttcccagtccaccgtccccatcgtgggcattgttg

SEQ ID NO: 344871 - DNA, 1008 bp, Artificial Sequence
  derived and/or modified sequence
agatgcgggtcacggcgccccgaaccctcctcctgctgctctggggggcagtggccctgaccgagacctgggccggctcccactccatgaggtatttctacaccgccatgtcccggcccggccgcggggagccccgcttcatcaccgtgggctacgtggacgacacgctgttcgtgaggttcgacagcgacgccacgagtccgaggaaggagccgcgggcgccatggatagagcaggaggggccggagtattgggaccgggagacacagatctccaagaccaacacacagacttaccgagagaacctgcgcaccgcgctccgctactacaaccagagcgaggccgggtctcacatcatccagaggatgtacggctgcgacgtggggccggacgggcgcctcctccgcgggtatgaccaggacgcctacgacggcaaggattacatcgccctgaacgaggacctgagctcctggaccgcggcggacaccgcggctcagatcacccagcgcaagtgggaggcggcccgtgtggcggagcaggacagagcctacctggagggcctgtgcgtggagtcgctccgcagatacctggagaacgggaaggagacgctgcagcgcgcggatcaggagcagaagtccctgttccccgctcagagactcgaactttccaatgaataggagattatcccagaccccccaaagacacatgtgacccaccaccccatctctgaccatgaggtcaccctgaggtgctgggccctgggcttctaccctgcggagatcacactgacctggcagcgggatggcgaggaccaaactcaggacaccgagcttgtggagaccagaccagcaggagatagaaccttccagaagtgggcagctgtggtggtgccttctggagaagagcagagatacacatgccatgtacagcatgaggggctgccgaagcccctcaccctgagatgggagccgtcttcccagtccaccgtccccatcgtgggcattgttg

SEQ ID NO: 344872 - DNA, 1537 bp, Artificial Sequence
  derived and/or modified sequence
cccacccggactcagattctccccagacgccgagatgcgggtcatggcgccccgaaccctcatcctgctgctctcgggagccctggccctgaccgagacctgggccggctcccactccatgaggtatttctacaccgctgtgtcccggcccggccgcggggagccccacttcatcgcagtgggctacgtggacgacacgcagttcgtgcggttcgacagcgacgccgcgagtccgagaggggagccgcgggcgccgtgggtggagcaggaggggccggagtattgggaccgggagacacagaagtacaagcgccaggcacagactgaccgagtgagcctgcggaacctgcgcggctactacaaccagagcgaggccgaggatgtatggctgcgacgtggggcccgacgggcgcctcctccgcgggtatgaccagtacgcctacgacggcaaggattacatcgccctgaacgaggatctgcgctcctggaccgccgcggacacggcggctcagatcacccagcgcaagtgggaggcggcccgtgaggcggagcagctgagagcctacctggagggcctgtgcgtggagtggctccgcagatacctgaagaatgggaaggagacgctgcagcgcgcggaacacccaaagacacacgtgacccaccatcccgtctctgaccatgaggccaccctgaggtgctgggccctgggcttctaccctgcggagatcacactgacctggcagtgggatggggaggaccaaactcaggacactgagcttgtggagaccaggccagcaggagatggaaccttccagaagtgggcagctgtggtggtgccttctggagaagagcagagatacacgtgccatgtgcagcacgaggggctgccggagcccctcaccctgagatgggagccgtcttcccagcccaccatccccatcgtgggcatcgttgctggcctggctgtcctggctgtcctagctgtcctaggagctgtggtggctgttgtgatgtgtaggaggaagagctcaggtggaaaaggagggagctgctctcaggctgcgtccagcaacagtgcccagggctctgatgagtctctcatcgcttgtaaagcctgagacagctgcctgtgtgggactgagatgcaggatttcttcacacctctcctttgtgacttcaagagcctctggcatctctttctgcaaaggcatctgaatgtgtctgcgttcctgttagcataatgtgaggaggtggagagacagcccacccccgtgtccaccgtgacccctgtccccacactgacctgtgttccctccccgatcatctttcctgttccagagaagtgggctggatgtctccatctctgtctcaacttcatggtgcgctgagctgcaacttcttacttccctaatgaagttaggaacctgaatataaatttgttttctcaaatatttgctatgaagggttgatggattaattaaataagtcaattcctggaagttgagagagcaaataaagacctgagaactttccagaa

SEQ ID NO: 344873 - DNA, 741 bp, Artificial Sequence
  derived and/or modified sequence
atggccagcgtgggcagaagagagggcaccgccggcggcggcgccggccccggcgagcccagaagagaggagggcagagccggcctgagccccagcagcccccccggcagccacagcatgagatacttctacaccgccatgagcagacccggcagaggcgagcccagattcatcaccgtgggctacgtggacgacaccctgttcgtgagattcgacagcgacgccaccagccccagaaaggagcccagagccccctggatcgagcaggagggccccgagtactgggacagagagacccagatcagcaagaccaacacccagacctacagagagaacctgagaaccgccctgagatactacaaccagagcgaggccggcagccacatcatccagagaatgtacggctgcgacgtgggccccgacggcagactgctgagaggctacgaccaggacgcctacgacggcaaggactacatcgccctgaacgaggacctgagcagctggaccgccgccgacaccgccgcccagatcacccagagaaagtgggaggccgccagagtggccgagcagctgagagcctacctggagggcctgtgcgtggagagcctgagaagatacctggagaacggcaaggagaccctgcagagagccgacccccccaagacccacgtgacccaccaccccatcagcgaccacgaggtgaccctgagatgctgggccctgggcttctaccccgcctag

SEQ ID NO: 344874 - DNA, 675 bp, Artificial Sequence
  derived and/or modified sequence
atgagagtgaccgcccccagaaccctgctgctgctgctgtggggcgccgtggccctgaccgagacctgggccggcagccacagcatgagatacttctacaccgccatgagcagacccggcagaggcgagcccagattcatcaccgtgggctacgtggacgacaccctgttcgtgagattcgacagcgacgccaccagccccagaaaggagcccagagccccctggatcgagcaggagggccccgagtactgggacagagagacccagatcagcaagaccaacacccagacctacagagagaacctgagaaccgccctgagatactacaaccagagcgaggccggcagccacatcatccagagaatgtacggctgcgacgtgggccccgacggcagactgctgagaggctacgaccaggacgcctacgacggcaaggactacatcgccctgaacgaggacctgagcagctggaccgccgccgacaccgccgcccagatcacccagagaaagtgggaggccgccagagtggccgagcagctgagagcctacctggagggcctgtgcgtggagagcctgagaagatacctggagaacggcaaggagaccctgcagagagccgaccaggagcagaagagcctgttccccgcccagagactggagctgagcaacgagtag

SEQ ID NO: 344875 - DNA, 741 bp, Artificial Sequence
  derived and/or modified sequence
atggccagcgtgggtcgccgggaaggcaccgccgggggtggagccggcccaggggagccacgtcgggaagaggggagggcaggattatcaccatcctctccacccgggtctcactccatgaggtatttctacactgccatgtctagaccagggcgcggagaacctaggttcatcactgtagggtatgttgacgataccctatttgtaagattcgactctgatgccacttcccctagaaaagaaccgagagctccatggatcgaacaggaggggcctgaatactgggacagagagactcagatttctaagacaaatactcaaacctatagggagaacctgcgcacggcactgcggtattataatcagtccgaagccggctcccacattatccagcggatgtacggatgcgatgtgggccctgatgggaggcttttgaggggttatgaccaggacgcttacgacgggaaagactatatagcgcttaatgaagatctttccagctggaccgccgccgatacagccgcccagatcacgcaacggaagtgggaggccgcgcgagttgccgaacagctgagagcctatctggagggcctgtgtgttgaatccctgagacgttacctcgagaatggtaaagagacattacagagggccgatccgccgaaaacccacgtcacacatcaccccatcagcgaccacgaggtgacattgcgatgctgggccttggggttttatcctgcatag

SEQ ID NO: 344876 - DNA, 675 bp, Artificial Sequence
  derived and/or modified sequence
atgcgggtgacggctccacgcacacttcttctccttctctggggggcggtggcacttactgaaacctgggccggctcacattccatgagatacttctatacagcgatgtcgcgaccgggcagaggcgagccaaggttcatcacagtcggatatgtagacgacaccctatttgtccgttttgactccgatgccaccagcccacgcaaagaacctagggccccctggatcgaacaggagggcccggagtattgggaccgggaaacccaaatttccaaaactaacacccaaacctatcgggagaaccttcggacggccttgagatactataaccagtctgaagctgggagccatatcatccagcgaatgtatggctgtgatgtgggccctgacggccggctgctgcggggatatgatcaggacgcttacgacgggaaggactatatcgctctcaatgaggatctgtcaagctggacagcagctgacaccgctgcgcagatcacgcaaaggaaatgggaggcagcccgggttgccgaacaactgagggcctatttggagggtctgtgcgtggaaagcctccgccgctacctggagaacgggaaggagacactgcaaagagctgatcaggaacaaaagtcgctcttccccgctcagcgtctggaactgtccaacgagtag

SEQ ID NO: 344877 - DNA, 741 bp, Artificial Sequence
  derived and/or modified sequence
atggcctctgtgggccggcgggagggcacagctgggggcggggccggccctggagagccccggcgggaggagggccgggccggcctgagccccagcagccccccaggcagccacagcatgagatacttctacacagccatgagccggcccggccgcggggagccccgcttcatcaccgtgggctacgtggatgacaccctgtttgtgcgctttgacagtgatgccaccagccccaggaaggagccccgggccccctggattgagcaggagggccctgagtactgggaccgggagacccagatcagcaagaccaacacccagacctaccgggagaacctgaggacagccctgcgctactacaaccagagcgaggccggcagccacatcatccagaggatgtatggctgtgatgtgggcccagatggccgcctgctgcggggctatgaccaggatgcctatgatggcaaggactacatcgccctgaatgaagacctgagctcctggacagctgctgacacagctgcccagatcacccagaggaagtgggaggccgcccgggtggccgagcagctgcgggcctacctggagggcctgtgtgtggagagcctgcggcgctacctggagaatggcaaggagaccctgcagagagctgacccccccaagacccacgtgacccaccaccccatcagtgaccacgaggtgaccctgcgctgctgggccctgggcttctacccagcctag

SEQ ID NO: 344878 - DNA, 675 bp, Artificial Sequence
  derived and/or modified sequence
atgagggtgacagcccccaggaccctgctgctgctgctgtggggcgctgtggccctgacagagacctgggccggcagccacagcatgagatacttctacacagccatgagcaggcctggccgcggggagccccgcttcatcaccgtgggctacgtggatgacaccctgtttgtgcgctttgacagtgatgccaccagccccaggaaggagccccgggccccctggattgagcaggagggccctgagtactgggaccgggagacccagatcagcaagaccaacacccagacctaccgggagaacctgaggacagccctgcgctactacaaccagagcgaggccggcagccacatcatccagaggatgtatggctgtgatgtgggcccagatggccgcctgctgcggggctatgaccaggatgcctatgatggcaaggactacatcgccctgaatgaagacctgagctcctggacagctgctgacacagctgcccagatcacccagaggaagtgggaggccgcccgggtggccgagcagctgcgggcctacctggagggcctgtgtgtggagagcctgcggcgctacctggagaatggcaaggagaccctgcagagagctgaccaggagcagaagagcctcttccctgcccagaggctggagctgagcaatgaatag

SEQ ID NO: 344879 - DNA, 741 bp, Artificial Sequence
  derived and/or modified sequence
atggccagcgtgggccggcgggagggcaccgccggcggcggcgccggcccaggagagcctagacgtgaagagggtagggcgggcctgagccctagtagtcctccggggtcacattcgatgagatatttttatactgcaatgtcacgacctggccgcggggagcccagattcatcacggtcggctatgtggatgataccttgttcgtgcggttcgacagcgacgccacctctccccgaaaggagcccagagccccgtggattgagcaggagggccccgagtactgggatcgggaaactcaaatttcgaagactaatactcagacctacagagagaatttaaggactgccctcaggtattataatcagtccgaagcgggctctcacattattcagaggatgtatgggtgcgacgtaggtcctgacgggaggctgttgagaggctacgaccaggatgcatacgacggcaaggactacatagccttaaatgaggatctgtcctcctggactgctgccgacaccgcagctcagatcacccagcgaaagtgggaggctgcaagagtggctgagcaattgagggcgtacctggagggactttgtgtcgagtccctgagaaggtatctggagaacggcaaggagactttgcagagggctgacccgccaaaaactcacgtcactcatcatccaatctccgaccacgaagtaacgctacgctgctgggctctaggattttatccagcctag

SEQ ID NO: 344880 - DNA, 675 bp, Artificial Sequence
  derived and/or modified sequence
atgcgggtgaccgccccccggaccctgctgctgctgctgtggggcgctgttgccctcactgaaacttgggcaggctctcacagcatgaggtacttctatactgcaatgtccaggccaggcagaggtgagcccagattcatcaccgtgggatacgtcgacgacaccttgttcgtgagattcgattcagatgccacatcaccacggaaggaaccacgagccccttggatcgaacaggagggccctgagtattgggaccgcgaaactcagatcagcaaaacgaatacccaaacgtatagagagaatctgcgtacagctctgcggtactataaccagtccgaggctgggagccacataattcagcgaatgtatggatgtgatgtgggacctgatgggcgactgctcagggggtacgatcaagacgcctatgatggtaaagattacattgctctcaacgaggatttgagctcttggacagctgcggatacggccgcacaaattacgcagagaaagtgggaggccgcacgcgtcgcagagcaacttagggcatatctcgaaggcttgtgcgtggagtcattgcggcggtatcttgaaaacggaaaagaaacactccagagagctgaccaggagcagaaaagtctctttcctgcacagcggctggaactgagtaatgagtag

SEQ ID NO: 344881 - DNA, 741 bp, Artificial Sequence
  derived and/or modified sequence
atggcgagcgtcgggagacgtgaaggaactgccggtggcggagcaggcccaggggaaccacggcgagaagagggaagggcaggtctgagcccttcctccccgcctggtagtcattcaatgaggtacttctataccgccatgtctcgtcccggaaggggcgagcctcgcttcattacagtgggatatgtagacgacacccttttcgtacggttcgactctgacgccacaagccccagaaaggagccaagggcaccatggattgagcaggaggggccagagtactgggacagggagacgcagatctcaaagacgaacacccagacataccgtgagaatcttagaacagctctgagatactataatcagtccgaagctggtagtcacataatacagaggatgtacgggtgcgacgtaggtccggacgggcgactcctgaggggctatgaccaggacgcttatgacggcaaagactatatcgcactgaacgaagatctctcttcgtggactgctgctgacaccgccgcacaaataactcaacgaaagtgggaggcagcgagggtggcagaacagctccgagcctatctcgaagggctgtgcgtggaatctctaagacgctacctggagaacggcaaggaaaccctgcagcgggctgatccacctaagacccacgttactcaccatcccatcagcgatcacgaggtcacccttcgatgctgggccttgggcttctatccggcttag

SEQ ID NO: 344882 - DNA, 675 bp, Artificial Sequence
  derived and/or modified sequence
atgcgagtaacggccccacgcactctgttactgcttctgtggggagctgtggcacttacggaaacctgggcgggatctcactccatgcggtacttctacacagcaatgtcccggccaggaaggggcgaacctagattcatcacagtgggatatgtggatgacaccctctttgtacgattcgattcagatgctacaagcccacggaaagaaccccgagccccatggattgaacaggagggccctgaatattgggacagagagacccagatcagtaagaccaatactcagacctatagagaaaatcttcggaccgcgcttcgctattacaatcagtcggaagctgggtcccacatcatccagcgtatgtacggatgcgatgtgggacccgacggaagactgctccggggatatgaccaggacgcctacgacggaaaggactacattgcattgaatgaagatctgtctagctggaccgccgcagataccgctgcacaaataacccagaggaagtgggaagctgccagggtggccgagcagctacgcgcttacctggaggggctgtgcgtggaaagcctgcgtaggtacctggaaaatgggaaggagactcttcagagagctgatcaggaacagaagtccctgttcccagcacagcgccttgaactgtccaacgagtag

SEQ ID NO: 344883 - protein, 24 aa, Artificial Sequence
  derived and/or modified sequence
MILNKALMLGALALTTVMSPCGGE

SEQ ID NO: 344884 - protein, 85 aa, Artificial Sequence
  derived and/or modified sequence
NTLICLVDNIFPPVVNITWLSNGHSVTEGVSETSFLSKSDHSFFKISYLTFLPSADEIYDCKVEHWGLDEPLLKHWGKDFMSFFY

SEQ ID NO: 344885 - DNA, 75 bp, Artificial Sequence
  derived and/or modified sequence
atgatactcaacaaggcgctcatgctgggtgcactggcacttacaaccgtcatgtccccctgtggcggcgaatag

SEQ ID NO: 344886 - DNA, 75 bp, Artificial Sequence
  derived and/or modified sequence
atgatccttaacaaggcgctgatgcttggcgcactggctcttactaccgtgatgtccccatgtggaggagaatag

SEQ ID NO: 344887 - DNA, 75 bp, Artificial Sequence
  derived and/or modified sequence
atgattcttaacaaggccttgatgctcggagccctcgcactgactaccgttatgtctccctgcggcggtgaatag

SEQ ID NO: 344888 - DNA, 258 bp, Artificial Sequence
  derived and/or modified sequence
aataccctgatctgcctggttgacaatatatttccccccgttgtgaatattacctggttatctaacggacactcggtcaccgaaggcgtttcagagacctcattcttgagtaagtccgatcattcctttttcaagatcagctacctcacctttttgccttctgcggatgaaatatatgattgtaaggtcgagcactggggccttgacgaacctctgctaaagcactgggggaaagattttatgtctttcttttattag

SEQ ID NO: 344889 - DNA, 75 bp, Artificial Sequence
  derived and/or modified sequence
atgatcctgaacaaggccctgatgctgggcgccctggccctgaccaccgtgatgagcccctgtggcggggagtag

SEQ ID NO: 344890 - DNA, 258 bp, Artificial Sequence
  derived and/or modified sequence
aacaccctcatctgcctggtggacaacatcttcccccctgtggtgaacatcacctggctgagcaatggccacagcgtgacagaaggagtgtctgagaccagcttcctgagcaagagtgaccacagcttcttcaagatctcctacctgaccttcctgcccagcgcagatgagatctatgactgcaaggtggagcactggggcctggatgagcccctgctgaagcactggggcaaggacttcatgtccttcttctactag

SEQ ID NO: 344891 - DNA, 255 bp, Artificial Sequence
  derived and/or modified sequence
aacaccctcatctgtcttgtggacaacatctttcctcctgtggtcaacatcacctggctgagcaatgggcactcagtcacagaaggtgtttctgagaccagcttcctctccaagagtgatcattccttcttcaagatcagttacctcaccttcctcccttctgctgatgagatttatgactgcaaggtggagcactggggcctggatgagcctcttctgaaacactggggtaaggacttcatgagtttcttttat

SEQ ID NO: 344892 - DNA, 75 bp, Artificial Sequence
  derived and/or modified sequence
atgatcctgaacaaggccctgatgctgggcgccctggccctgaccacagtaatgtcaccatgcgggggtgaatag

SEQ ID NO: 344893 - DNA, 75 bp, Artificial Sequence
  derived and/or modified sequence
atgatcctgaacaaggccctgatgctgggcgccctggccctgaccacagtcatgtctccatgcggcggtgaatag

SEQ ID NO: 344894 - DNA, 75 bp, Artificial Sequence
  derived and/or modified sequence
atgatcctgaacaaggccctgatgctgggcgccctggccctgaccactgtgatgtccccctgtgggggtgagtag

SEQ ID NO: 344895 - DNA, 258 bp, Artificial Sequence
  derived and/or modified sequence
aacaccctgatctgcctggtggacaacatcttcccccccgtggtgaacattacctggctgagtaacggccacagcgtaacagaaggtgtctctgagacgtcctttctttccaagagtgatcacagttttttcaaaataagttatcttacgtttcttccatctgctgacgaaatttacgattgcaaggttgagcactgggggctagacgagccattgttaaagcactgggggaaggactttatgtccttcttctactag

SEQ ID NO: 344896 - DNA, 75 bp, Artificial Sequence
  derived and/or modified sequence
atgattttaaataaggcgctgatgctcggcgcactggcactcactacagtgatgtccccatgtggcggagaatag

SEQ ID NO: 344897 - DNA, 75 bp, Artificial Sequence
  derived and/or modified sequence
atgatcctaaacaaggcgttgatgctcggagccttagccctcactaccgtgatgagtccttgcggtggcgaatag

SEQ ID NO: 344898 - DNA, 75 bp, Artificial Sequence
  derived and/or modified sequence
atgattctcaacaaggcacttatgctgggcgctcttgcattaactaccgtgatgagcccctgcgggggagagtag

SEQ ID NO: 344899 - DNA, 258 bp, Artificial Sequence
  derived and/or modified sequence
aacacattgatttgtttagtggataacatatttcctcctgtggtgaatattacctggcttagcaacggccattctgtgacagagggcgtatccgagacctccttccttagtaaatcggaccactcgttctttaagatttcctaccttacttttttgccgtctgccgatgagatctacgactgcaaggtggagcattggggactggacgagcctttactgaagcattgggggaaggacttcatgagcttcttttattag

SEQ ID NO: 344900 - DNA, 75 bp, Artificial Sequence
  derived and/or modified sequence
atgatcctgaacaaggccctgatgctgggcgccctggccctgaccaccgtgatgagcccctgcggcggcgagtag

SEQ ID NO: 344901 - DNA, 258 bp, Artificial Sequence
  derived and/or modified sequence
aacaccctgatctgcctggtggacaacatcttcccccccgtggtgaacatcacctggctgagcaacggccacagcgtgaccgagggcgtgagcgagaccagcttcctgagcaagagcgaccacagcttcttcaagatcagctacctgaccttcctgcccagcgccgacgagatctacgactgcaaggtggagcactggggcctggacgagcccctgctgaagcactggggcaaggacttcatgagcttcttctactag

SEQ ID NO: 344902 - protein, 1382 aa, Artificial Sequence
  derived and/or modified sequence
MLRERGTPPVDPKLAWVGDVFTATPAEPRPLTSPLRQAADEDDKGMRSETPPVPPPPPYLASYPGFPENGAPGPPISRFPLEEPGPRPLPWPPGSDEVAKIQTPPPKKEPPKEETAQLTGPEAGRKPARGVGSGGQGPPPPRRESRTETRWGPRPGSSRRGIPPEEPGAPPRRAGPIKKPPPPTKVEELPPKPLEQGDETPKPPKPDPLKITKGKLGGPKETPPNGNLSPAPRLRRDYSYERVGPTSCRGRGRGEYFARGRGFRGTYGGRGRGARSREFRSYREFRGDDGRGGGTGGPNHPPAPRGRTASETRSEGSEYEEIPKRRRQRGSETGSETHESDLAPSDKEAPTPKEGTLTQVPLAPPPPGAPPSPAPARFTARGGRVFTPRGVPSRRGRGGGRPPPQVCPGWSPPAKSLAPKKPPTGPLPPSKEPLKEKLIPGPLSPVARGGSNGGSNVGMEDGERPRRRRHGRAQQQDKPPRFRRLKQERENAARGSEGKPSLTLPASAPGPEEALTTVTVAPAPRRAAAKSPDLSNQNSDQANEEWETASESSDFTSERRGDKEAPPPVLLTPKAVGTPGGGGGGAVPGISAMSRGDLSQRAKDLSKRSFSSQRPGMERQNRRPGPGGKAGSSGSSSGGGGGGPGGRTGPGRGDKRSWPSPKNRSRPPEERPPGLPLPPPPPSSSAVFRLDQVIHSNPAGIQQALAQLSSRQGSVTAPGGHPRHKPGPPQAPQGPSPRPPTRYEPQRVNSGLSSDPHFEEPGPMVRGVGGTPRDSAGVSPFPPKRRERPPRKPELLQEESLPPPHSSGFLGSKPEGPGPQAESRDTGTEALTPHIWNRLHTATSRKSYRPSSMEPWMEPLSPFEDVAGTEMSQSDSGVDLSGDSQVSSGPCSQRSSPDGGLKGAAEGPPKRPGGSSPLNAVPCEGPPGSEPPRRPPPAPHDGDRKELPREQPLPPGPIGTERSQHTDRGTEPGPIRPSHRPGPPVQFGTSDKDSDLRLVVGDSLKAEKELTASVTEAIPVSRDWELLPSAAASAEPQSKNLDSGHCVPEPSSSGQRLYPEVFYGSAGPSSSQISGGAMDSQLHPNSGGFRPGTPSLHPYRSQPLYLPPGPAPPSALLSGVALKGQFLDFSTMQATELGKLPAGGVLYPPPSFLYSPAFCPSPLPDTSLLQVRQDLPSPSDFYSTPLQPGGQSGFLPSGAPAQQMLLPMVDSQLPVVNFGSLPPAPPPAPPSLSLLPVGPALQPPSLAVRPPPAPATRVLPSPARPFPASLGRAELHPVELKPFQDYQKLSSNLGGPGSSRTPPTGRSFSGLNSRLKATPSTYSGVFRTQRVDLYQQASPPDALRWIPKPWERTGPPPREGPSRRAEEPGSRGDKEPGLPPPR

SEQ ID NO: 344903 - protein, 1382 aa, Artificial Sequence
  derived and/or modified sequence
MLRERGTPPVDPKLAWVGDVFTATPAEPRPLTSPLRQAADEDDKGMRSETPPVPPPPPYLASYPGFPENGAPGPPISRFPLEEPGPRPLPWPPGSDEVAKIQTPPPKKEPPKEETAQLTGPEAGRKPARGVGSGGQGPPPPRRESRTETRWGPRPGSSRRGIPPEEPGAPPRRAGPIKKPPPPTKVEELPPKPLEQGDETPKPPKPDPLKITKGKLGGPKETPPNGNLSPAPRLRRDYSYERVGPTSCRGRGRGEYFARGRGFRGTYGGRGRGARSREFRSYREFRGDDGRGGGTGGPNHPPAPRGRTASETRSEGSEYEEIPKRRRQRGSETGSETHESDLAPSDKEAPTPKEGTLTQVPLAPPPPGAPPSPAPARFTARGGRVFTPRGVPSRRGRGGGRPPPQVCPGWSPPAKSLAPKKPPTGPLPPSKEPLKEKLIPGPLSPVARGGSNGGSNVGMEDGERPRRRRHGRAQQQDKPPRFRRLKQERENAARGSEGKPSLTLPASAPGPEEALTTVTVAPAPRRAAAKSPDLSNQNSDQANEEWETASESSDFTSERRGDKEAPPPVLLTPKAVGTPGGGGGGAVPGISAMSRGDLSQRAKDLSKRSFSSQRPGMERQNRRPGPGGKAGSSGSSSGGGGGGPGGRTGPGRGDKRSWPSPKNRSRPPEERPPGLPLPPPPPSSSAVFRLDQVIHSNPAGIQQALAQLSSRQGSVTAPGGHPRHKPGLPQAPQGPSPRPPTRYEPQRVNSGLSSDPHFEEPGPMVRGVGGTPRDSAGVSPFPPKRRERPPRKPELLQEESLPPPHSSGFLGSKPEGPGPQAESRDTGTEALTPHIWNRLHTATSRKSYRPSSMEPWMEPLSPFEDVAGTEMSQSDSGVDLSGDSQVSSGPCSQRSSPDGGLKGAAEGPPKRPGGSSPLNAVPCEGPPGSEPPRRPPPAPHDGDRKELPREQPLPPGPIGTERSQRTDRGTEPGPIRPSHRPGPPVQFGTSDKDSDLRLVVGDSLKAEKELTASVTEAIPVSRDWELLPSAAASAEPQSKNLDSGHCVPEPSSSGQRLYPEVFYGSAGPSSSQISGGAMDSQLHPNSGGFRPGTPSLHPYRSQPLYLPPGPAPPSALLSGVALKGQFLDFSTMQATELGKLPAGGVLYPPPSFLYSPAFCPSPLPDTSLLQVRQDLPSPSDFYSTPLQPGGQSGFLPSGAPAQQMLLPMVDSQLPVVNFGSLPPAPPPAPPPLSLLPVGPALQPPSLAVRPPPAPATRVLPSPARPFPASLGRAELHPVELKPFQDYQKLSSNLGGPGSSRTPPTGRSFSGLNSRLKATPSTYSGVFRTQRVDLYQQASPPDALRWIPKPWERTGPPPREGPSRRAEEPGSRGDKEPGLPPPR

SEQ ID NO: 344904 - protein, 1382 aa, Artificial Sequence
  derived and/or modified sequence
MLRERGTPPVDPKLAWVGDVFTATPAEPRPLTSPLRQAADEDDKGMRSETPPVPPPPPYLASYPGFPENGAPGPPISRFPLEEPGPRPLPWPPGSDEVAKIQTPPPKKEPPKEETAQLTGPEAGRKPARGVGSGGQGPPPPRRESRTETRWGPRPGSSRRGIPPEEPGAPPRRAGPIKKPPPPTKVEELPPKPLEQGDETPKPPKPDPLKITKGKLGGPKETPPNGNLSPAPRLRRDYSYERVGPTSCRGRGRGEYFARGRGFRGTYGGRGRGARSREFRSYREFRGDDGRGGGTGGPNHPPAPRGRTASETRSEGSEYEEIPKRRRQRGSETGSETHESDLAPSDKEAPTPKEGTLTQVPLAPPPPGAPPSPAPARFTARGGRVFTPRGVPSRRGRGGGRPPPQVCPGWSPPAKSLAPKKPPTGPLPPSKEPLKEKLIPGPLSPVARGGSNGGSNVGMEDGERPRRRRHGRAQQQDKPPRFRRLKQERENAARGSEGKPSLTLPASAPGPEEALTTVTVAPAPRRAAAKSPDLSNQNSDQANEEWETASESSDFTSERRGDKEAPPPVLLTPKAVGTPGGGGGGAVPGISAMSRGDLSQRAKDLSKRSFSSQRPGMERQNRRPGPGGKAGSSGSSSGGGGGGPGGRTGPGRGDKRSWPSPKNRSRPPEERPPGLPLPPPPPSSSAVFRLDQVIHSNPAGIQQALAQLSSRQGSVTAPGGHPRHKPGPPQAPQGPSPRPPTRYEPQRVNSGLSSDPHFEEPGPMVRGVGGTPRDSAGVSPFPPKRRERPPRKPELLQEESLPPPHSSGFLGSKPEGPGPQAESRDTGTEALTPHIWNRLHTATSRKSYRPSSMEPWMEPLSPFEDVAGTEMSQSDSGVDLSGDSQVSSGPCSQRSSPDGGLKGAAEGPPKRPGGSSPLNAVPCEGPPGSEPPRRPPPAPHDGDRKELPREQPLPPGPIGTERSQRTDRGTEPGPIRPSHRPGPPVQFGTSDKDSDLRLVVGDSLKAEKELTASVTEAIPVSRDWELLPSAAASAEPQSKNLDSGHCVPEPSSSGQRLYPEVFYGSAGPSSSQISGGAMDSQLHPNSGGFRPGTPSLHPYRSQPLYLPPGPAPPSALLSGVALKGQFLDFSTMQATELGKLPAGGVLYPPPSFLYSPAFCPSPLPDTSLLQVRQDLPSPSDFYSTPLQPGGQSGFLPSGAPAQQMLLPMVDSQLPVVNFGSLPPAPPPAPPPLSLLPVGPALQPPSLAVRPPPAPATRVLPSPARPFPASLGRAELHPVELKPFQDYQKLSSNLGGPGSSRTPPTGRSFSGLNSRLKATPSTYSGVFRTQRVDLYQQASPPDALRWIPKPWERTGPPPREGPSRRAEEPGSRGDKEPGLPPPR

SEQ ID NO: 344905 - protein, 2149 aa, Artificial Sequence
  derived and/or modified sequence
MSDRSGPTAKGKDGKKYSSLNLFDTYKGKSLEIQKPAVAPRHGLQSLGKVAIARRMPPPANLPSLKAENKGNDPNVSLVPKDGTGWASKQEQSDPKSSDASTAQPPESQPLPASQTPASNQPKRPPAAPENTPLVPSGVKSWAQASVTHGAHGDGGRASSLLSRFSREEFPTLQAAGDQDKAAKERESAEQSSGPGPSLRPQNSTTWRDGGGRGPDELEGPDSKLHHGHDPRGGLQPSGPPQFPPYRGMMPPFMYPPYLPFPPPYGPQGPYRYPTPDGPSRFPRVAGPRGSGPPMRLVEPVGRPSILKEDNLKEFDQLDQENDDGWAGAHEEVDYTEKLKFSDEEDGRDSDEEGAEGHRDSQSASGEERPPEADGKKGNSPNSEPPTPKTAWAETSRPPETEPGPPAPKPPLPPPHRGPAGNWGPPGDYPDRGGPPCKPPAPEDEDEAWRQRRKQSSSEISLAVERARRRREEEERRMQEERRAACAEKLKRLDEKFGAPDKRLKAEPAAPPAAPSTPAPPPAVPKELPAPPAPPPASAPTPETEPEEPAQAPPAQSTPTPGVAAAPTLVSGGGSTSSTSSGSFEASPVEPQLPSKEGPEPPEEVPPPTTPPVPKVEPKGDGIGPTRQPPSQGLGYPKYQKSLPPRFQRQQQEQLLKQQQQHQWQQHQQGSAPPTPVPPSPPQPVTLGAVPAPQAPPPPPKALYPGALGRPPPMPPMNFDPRWMMIPPYVDPRLLQGRPPLDFYPPGVHPSGLVPRERSDSGGSSSEPFDRHAPAMLRERGTPPVDPKLAWVGDVFTATPAEPRPLTSPLRQAADEDDKGMRSETPPVPPPPPYLASYPGFPENGAPGPPISRFPLEEPGPRPLPWPPGSDEVAKIQTPPPKKEPPKEETAQLTGPEAGRKPARGVGSGGQGPPPPRRESRTETRWGPRPGSSRRGIPPEEPGAPPRRAGPIKKPPPPTKVEELPPKPLEQGDETPKPPKPDPLKITKGKLGGPKETPPNGNLSPAPRLRRDYSYERVGPTSCRGRGRGEYFARGRGFRGTYGGRGRGAAGNSAVTESFEEMMGVEVGQGDQTTLLLPEAALPARHGARVQSMRKSPSGAGSGAQKQAARPMRVIWLLQTRRLPHPRREHSPRSRSPTTRSPTFPAPARFTPGVGESSLPEGISPGPRRREPPQVCPGWSPPAKSLAPKKPPTGPLPPSKEPLKEKLIPGPLSPVARGGSNGGSNVGMEDGERPRRRRHGRAQQQDKPPRFRRLKQERENAARGSEGKPSLTLPASAPGPEEALTTVTVAPAPRRAAAKSPDLSNQNSDQANEEWETASESSDFTSERRGDKEAPPPVLLTPKAVGTPGGGGGGAVPGISAMSRGDLSQRAKDLSKRSFSSQRPGMERQNRRPGPGGKAGSSGSSSGGGGGGPGGRTGPGRGDKRSWPSPKNRSRPPEERPPGLPLPPPPPSSSAVFRLDQVIHSNPAGIQQALAQLSSRQGSVTAPGGHPRHKPGLPQAPQGPSPRPPTRYEPQRVNSGLSSDPHFEEPGPMVRGVGGTPRDSAGVSPFPPKRRERPPRKPELLQEESLPPPHSSGFLGSKPEGPGPQAESRDTGTEALTPHIWNRLHTATSRKSYRPSSMEPWMEPLSPFEDVAGTEMSQSDSGVDLSGDSQVSSGPCSQRSSPDGGLKGAAEGPPKRPGGSSPLNAVPCEGPPGSEPPRRPPPAPHDGDRKELPREQPLPPGPIGTERSQRTDRGTEPGPIRPSHRPGPPVQFGTSDKDSDLRLVVGDSLKAEKELTASVTEAIPVSRDWELLPSAAASAEPQSKNLDSGHCVPEPSSSGQRLYPEVFYGSAGPSSSQISGGHGLSITSKQWRRPGTPSLHPYRSQPLYLPPGPAPPSALLSGVALKGQFLDFSTMQATELGKLPAGGVLYPPPSFLYSPAFCPSPLPDTSLLQVRQDLPSPSDFYSTPLQPGGQSGFLPSGAPAQQMLLPMVDSQLPVVNFGSLPPAPPPAPPPLSLLPVGPALQPPSLAVRPPPAPATRVLPSPARPFPASLGRAELHPVELKPFQDYQKLSSNLGGPGSSRTPPTGRSFSGLNSRLKATPSTYSGVFRTQRVDLYQQASPPDALRWIPKPWERTGPPPREGPSRRAEEPGSRGDKEPGLPPPR

SEQ ID NO: 344906 - protein, 2149 aa, Artificial Sequence
  derived and/or modified sequence
MSDRSGPTAKGKDGKKYSSLNLFDTYKGKSLEIQKPAVAPRHGLQSLGKVAIARRMPPPANLPSLKAENKGNDPNVSLVPKDGTGWASKQEQSDPKSSDASTAQPPESQPLPASQTPASNQPKRPPAAPENTPLVPSGVKSWAQASVTHGAHGDGGRASSLLSRFSREEFPTLQAAGDQDKAAKERESAEQSSGPGPSLRPQNSTTWRDGGGRGPDELEGPDSKLHHGHDPRGGLQPSGPPQFPPYRGMMPPFMYPPYLPFPPPYGPQGPYRYPTPDGPSRFPRVAGPRGSGPPMRLVEPVGRPSILKEDNLKEFDQLDQENDDGWAGAHEEVDYTEKLKFSDEEDGRDSDEEGAEGHRDSQSASGEERPPEADGKKGNSPNSEPPTPKTAWAETSRPPETEPGPPAPKPPLPPPHRGPAGNWGPPGDYPDRGGPPCKPPAPEDEDEAWRQRRKQSSSEISLAVERARRRREEEERRMQEERRAACAEKLKRLDEKFGAPDKRLKAEPAAPPAAPSTPAPPPAVPKELPAPPAPPPASAPTPEKEPEEPAQAPPAQSTPTPGVAAAPTLVSGGGSTSSTSSGSFEASPVEPQLPSKEGPEPPEEVPPPTTPPVPKVEPKGDGIGPTRQPPSQGLGYPKYQKSLPPRFQRQQQEQLLKQQQQHQWQQHQQGSAPPTPVPPSPPQPVTLGAVPAPQAPPPPPKALYPGALGRPPPMPPMNFDPRWMMIPPYVDPRLLQGRPPLDFYPPGVHPSGLVPRERSDSGGSSSEPFDRHAPAMLRERGTPPVDPKLAWVGDVFTATPAEPRPLTSPLRQAADEDDKGMRSETPPVPPPPPYLASYPGFPENGAPGPPISRFPLEEPGPRPLPWPPGSDEVAKIQTPPPKKEPPKEETAQLTGPEAGRKPARGVGSGGQGPPPPRRESRTETRWGPRPGSSRRGIPPEEPGAPPRRAGPIKKPPPPTKVEELPPKPLEQGDETPKPPKPDPLKITKGKLGGPKETPPNGNLSPAPRLRRDYSYERVGPTSCRGRGRGEYFARGRGFRGTYGGRGRGAAGNSAVTESFEEMMGVEVGQGDQTTLLLPEAALPARHGARVQSMRKSPSGAGSGAQKQAARPMRVIWLLQTRRLPHPRREHSPRSRSPTTRSPTFPAPARFTPGVGESSLPEGISPGPRRREPPQVCPGWSPPAKSLAPKKPPTGPLPPSKEPLKEKLIPGPLSPVARGGSNGGSNVGMEDGERPRRRRHGRAQQQDKPPRFRRLKQERENAARGSEGKPSLTLPASAPGPEEALTTVTVAPAPRRAAAKSPDLSNQNSDQANEEWETASESSDFTSERRGDKEAPPPVLLTPKAVGTPGGGGGGAVPGISAMSRGDLSQRAKDLSKRSFSSQRPGMERQNRRPGPGGKAGSSGSSSGGGGGGPGGRTGPGRGDKRSWPSPKNRSRPPEERPPGLPLPPPPPSSSAVFRLDQVIHSNPAGIQQALAQLSSRQGSVTAPGGHPRHKPGPPQAPQGPSPRPPTRYEPQRVNSGLSSDPHFEEPGPMVRGVGGTPRDSAGVSPFPPKRRERPPRKPELLQEESLPPPHSSGFLGSKPEGPGPQAESRDTGTEALTPHIWNRLHTATSRKSYRPSSMEPWMEPLSPFEDVAGTEMSQSDSGVDLSGDSQVSSGPCSQRSSPDGGLKGAAEGPPKRPGGSSPLNAVPCEGPPGSEPPRRPPPAPHDGDRKELPREQPLPPGPIGTERSQHTDRGTEPGPIRPSHRPGPPVQFGTSDKDSDLRLVVGDSLKAEKELTASVTEAIPVSRDWELLPSAAASAEPQSKNLDSGHCVPEPSSSGQRLYPEVFYGSAGPSSSQISGGHGLSVTSKQWRRPGTPSLHPYRSQPLYLPPGPAPPSALLSGVALKGQFLDFSTMQATELGKLPAGGVLYPPPSFLYSPAFCPSPLPDTSLLQVRQDLPSPSDFYSTPLQPGGQSGFLPSGAPAQQMLLPMVDSQLPVVNFGSLPPAPPPAPPSLSLLPVGPALQPPSLAVRPPPAPATRVLPSPARPFPASLGRAELHPVELKPFQDYQKLSSNLGGPGSSRTPPTGRSFSGLNSRLKATPSTYSGVFRTQRVDLYQQASPPDALRWIPKPWERTGPPPREGPSRRAEEPGSRGDKEPGLPPPR

SEQ ID NO: 344907 - DNA, 258 bp, Artificial Sequence
  derived and/or modified sequence
gccaccctgagaaacaagctgatgtggaacatcatcagcatcatcatcatcctggccggcgccatcgccctgatcatcggcttcggcatcagcgaggtgagcgtgtggctgagcgccatgaagggctgcagaagcagcaaggccagcctgagcatcgacctgtgcttcctgaactgcagagagaccctgcaccacagccactactgcagactgagctgggagcactggggcggctggaaccccgagctgcacttctag

SEQ ID NO: 344908 - DNA, 132 bp, Artificial Sequence
  derived and/or modified sequence
atggaatctaccgggtccgtaggggaggcaccaggaggcagacatggtccccgacggggtccccaccccttaggagcgttgctacgatggcgtggagggggaggacgggcattggatccctgttgcccctag

SEQ ID NO: 344909 - DNA, 6474 bp, Artificial Sequence
  derived and/or modified sequence
atgtcagaccgcagtggaccaaccgcaaaaggtaaagacgggaagaaatattccagtctgaacctgttcgacacctacaaaggaaagtcactagagatccagaagcccgctgtcgcaccccgccacggacttcagtctttaggcaaggtcgctattgcccgtcggatgccccccccagctaacctgcctagcttgaaggccgagaacaagggcaacgatcctaacgtgagtttggttcccaaggatggcacaggctgggctagcaaacaggaacaatccgaccctaagtctagtgacgcctccaccgctcaaccaccagaaagtcagccattaccagcttcacagacccccgcctccaatcagcccaagagacccccggcagcccccgaaaacaccccactggtgcccagtggggttaagagttgggctcaagcatccgtgacccacggcgctcacggtgacggaggaagggcttcttccctgctgtctcgattttctcgggaggaattccccacgcttcaggctgctggagatcaagataaagcagctaaagagcgcgagtccgctgagcagagcagcggacctggcccttccctgcgaccacagaactccacaacttggcgggacggagggggtagggggcccgacgaactggaagggccagactctaaattgcatcacgggcacgatcctcgtggcggtctacagccctccggcccaccacaattccccccataccggggcatgatgccacctttcatgtacccaccataccttccgtttcctccgccgtacggcccgcaggggccgtatagatatcctacaccagacggccccagccgctttccccgggtggctggtccacggggatctggaccccctatgcgcctggttgagccagtcgggaggccctccatcttgaaggaggacaatctgaaggagtttgaccagctcgatcaagaaaatgacgacggatgggctggggcccatgaggaggtggactacacagagaagctcaaatttagtgatgaggaggatggacgcgacagcgacgaagagggcgccgagggccatagagacagtcagtcagcttcgggtgaggagcgaccccctgaagccgacggtaagaaaggaaattcccctaatagcgaacctccaactcccaagaccgcatgggcggaaacttccagaccaccagaaactgaaccagggcccccagctccaaagcccccgctgccacccccacacagggggcctgcaggtaactggggccctcctggggattacccggatcgaggtggtccgccatgtaagccgccagcacccgaggatgaagatgaagcatggcggcagcggcggaagcagtcgagctccgagatttctctcgcagtggagcgtgcaaggcgccgccgagaggaagaagagcgtcgcatgcaggaggaacgacgggctgcctgtgctgagaagctgaaaaggctggacgagaaattcggtgctccagataagcgactgaaggccgaaccagctgctccgcctgcagccccatcaaccccggccccgcctccagcagtgccaaaggagttgccagcccccccagcaccccctccagccagtgcacctactccagaaacagaacctgaggagcccgcgcaggctcccccggcccagtctactccaactcctggcgtggctgctgctcccacgcttgtatcagggggggggagcaccagctctacctcatccgggtcatttgaggcatctccggtggagccccaactgccaagcaaggagggaccagaaccccccgaggaggtgccacccccgacaacccctccagtccctaaggtagagccgaagggtgacgggattggccccacacggcaaccccctagccaggggctcggctatcccaaatatcagaagagcctgccccctagattccaaaggcaacaacaagaacagctcctcaagcagcagcaacagcaccagtggcagcagcaccagcaaggttctgctccccctactcctgtgccaccctctcctcctcagccggtgacacttggagccgtccccgccccacaggctcctccaccacctccaaaggctctctaccctggcgcactgggcaggccacctcccatgcctcctatgaacttcgacccgcggtggatgatgataccaccatacgtagatccaagactccttcagggtcgtccaccactagatttttacccaccaggagttcacccttcggggctcgtgcctcgcgagagatccgacagcggtggtagtagttcagaacctttcgatagacatgcccctgcaatgctgagagagagaggaacaccacctgtggaccccaaactcgcctgggttggcgacgtctttacagctacgcccgcagagcctaggcctctgacaagccctctgaggcaagcagcggacgaagatgacaaggggatgaggagtgaaacacctccagtgccccctcctccaccgtacctggcctcatatcccgggtttcctgaaaacggcgccccaggaccacccatcagccgctttcctttggaggagcccgggcctagacctctgccctggcctcccggctcagacgaagttgccaaaattcaaacgcccccccccaaaaaggagccccctaaggaagaaactgctcagctgacgggtccagaggcgggcagaaaacccgcacgaggtgtgggtagcggtggccaggggccgccccctccccggcgggagagccggactgagactaggtggggacctcgccctggcagtagcaggcgcgggatccctcccgaagagcctggggccccacccagacgagctgggccgatcaagaaacccccaccgcctaccaaagtagaagaattgccaccaaaaccgctagaacaaggagacgagacccccaagccacctaagcctgatcccctgaagattaccaagggaaagcttggaggccctaaagaaacaccccctaacgggaatctctctccagcccccagactgcgtcgcgattattcttatgaacgcgtcggccctacaagttgtcgcggccgcgggagaggcgaatactttgcccgcgggagaggcttcagaggaacatatggaggcagaggtaggggcgccagatcccgtgagtttcgttcttacagggaatttcggggcgacgatggacgagggggtggaaccggcgggccaaatcacccccccgcgcctcggggcagaaccgcaagcgagaccagatccgagggctcggagtatgaagagataccaaaacgaagaaggcaacgagggtcagaaactggaagcgagactcatgagtccgatctcgctccttcagataaggaggcgccgacacccaaggagggcactcttactcaggtgcctttggctcccccacctcctggagctcccccgagccctgcccccgctcggtttacagccagaggcggcagggtgtttacccccaggggcgtacctagtagaagggggcggggaggaggccggccacctccccaagtgtgtcccggatggagtcctcccgcaaaatctttggctcccaaaaaaccacctaccggccctctcccgccgtctaaagagccacttaaggaaaagctcatccctggccccttgtcgccagttgccaggggaggcagcaatggtggcagcaacgtgggcatggaggacggcgaacgtccgagacgccgacggcacggacgcgcccagcagcaggataagcccccacgcttccgaagactaaagcaagaacgagagaacgcagcccggggttccgagggtaaaccatccctgactctgcctgcctctgcaccgggacctgaggaggcactgacaaccgtcactgtcgcacctgcaccaaggagggctgcagccaaatcccccgatttgtcaaatcagaactcggaccaggctaacgaggaatgggagacagccagcgagtcctcagactttacctccgaacgcagaggagataaagaagcccctcctcctgttctcttaacacctaaggccgtgggaacccccggtggcggaggggggggcgccgtgcccggaatttccgcaatgagtcgcggagatctgagtcagcgggctaaagacctgagtaaaaggtctttcagttcgcagcgccccggcatggaacgccagaaccgcagacctggccctggcggtaaagctgggagctccggttctagctctgggggtggcgggggtggccccggcggccgcacggggccgggtcgcggggacaaacgaagttggccttcccctaaaaatcggtctcggccccctgaggagagaccccccggacttccccttcctcccccaccaccctcttcatccgctgtgttcagattggaccaggtgatccattctaatcctgcaggcattcaacaggcgctggcacaactctcttccaggcagggctccgtgaccgcaccaggcggccaccctcggcataaaccaggactgccgcaggctccgcagggaccaagtccgcggccacctaccaggtatgagcctcagagggtcaattctgggctctcgtccgacccccatttcgaagaacccgggccgatggttcggggagtgggcgggacaccccgcgacagtgcaggcgtgtccccctttccgccaaagcgccgggagcgcccgccgcggaaacccgagttattacaggaggagtcccttcccccgccccactccagcggattcttgggatccaaaccagagggtcccggtccccaagcagaaagtcgcgacacagggactgaagctctaactccacacatatggaatcggctacatacagccaccagcaggaaatcttacagacccagcagtatggagccatggatggaaccccttagtccctttgaagatgtggccggcacggaaatgtcccagagcgattccggtgtggatttgagcggagactctcaggtctcttcaggcccatgtagtcagcggtcgagtcccgacggaggactgaagggcgccgctgaaggaccgccaaagaggcctggggggtcctcccctttaaatgctgtcccttgtgaaggcccccccgggtctgagcctcctcggcgtccacccccggcaccgcacgacggtgatcgaaaggaactgccaagggagcagccactgcctccaggccccatcggcactgaacgctcacagcggaccgatagaggcaccgagccaggcccaattagaccaagccatcgaccaggccctcctgtgcagtttggtactagtgacaaagactccgatctgcggctggtggtgggggatagcctcaaagcagagaaggagctcacggcaagcgttaccgaggccattcccgttagccgagactgggagctcttgccaagcgccgccgcctctgcggaaccacagtctaaaaacctggactcaggacattgcgttcccgagccctcaagtagtggtcagcgcctgtatcccgaggtattctacggcagcgctggcccaagctcttcacagatttccggcggagcaatggatagtcagcttcatccaaacagcggaggttttcggcccggtaccccgagtttacatccctatcggagccaaccattgtacttaccccccgggcctgcgccacccagcgctttgctgtcaggggtggcactcaaggggcagtttctcgatttctccacaatgcaggcaaccgaacttggtaagttacctgcggggggcgtgttgtatcctcccccttccttcctgtacagtcccgcattttgtccctcacctctgcccgatacatccctgttgcaggtgcgtcaggatctcccttcccctagcgacttctactccacacccctgcagcctggcggtcagtctggatttttaccgagcggggcacctgcgcagcagatgcttctcccaatggttgactcgcaactcccggttgtgaactttgggagccttcctccggcgcccccacccgcgcctccgccactgagcctcctcccagtcggcccagccttgcaacccccctctctggcagttcgtcctccaccagcacctgccacgagagttcttccatctcccgcacggcccttccccgccagtcttggccgggctgagttgcatcccgttgagctgaaaccatttcaagattatcaaaaactttcatccaacctgggtggacctggatcaagccgaacacctccaactggtagaagctttagtggacttaacagccgcctgaaagcaaccccctcaacgtatagcggggttttcaggactcaaagagttgatttataccaacaggccagcccgcccgacgccctaaggtggatccccaagccctgggaaaggactggtccacctcctcgggaagggccgtctcgtagagccgaagaacctggctctcgtggagataaagagcccggcctaccccctccccgatag

SEQ ID NO: 344910 - DNA, 6474 bp, Artificial Sequence
  derived and/or modified sequence
atgtcagatagatctggaccaaccgccaagggcaaggatggcaaaaagtattcatcactgaacctgtttgatacatacaaaggaaaaagcttagaaattcagaagccagctgtcgctccacggcacggcctgcagtccctaggtaaagtcgcgatcgcccgccgtatgcctcccccagcgaacctcccatcattgaaggcggaaaacaagggtaacgaccctaacgtttccctggtgcctaaagatgggactggctgggctagcaaacaggagcagtctgacccgaagtcctctgacgcgtctactgcccagcctccagaaagccagcccttgcccgcatcacaaactcctgcctccaaccagcctaaaagaccacctgcagctcctgagaatacccccctggtgccaagcggcgtgaagagctgggcccaggcctctgtgactcatggggcgcacggagacggtggtcgcgcctcctccttgctgagtagatttagcagggaggaattcccaaccctgcaggctgcaggagatcaggacaaagctgcgaaggagagagaatcagcggagcagagtagtggccctggcccgagtctgagaccgcagaactccacgacatggcgcgacggaggaggtagaggcccggacgagttagaaggcccagactctaagctgcaccacgggcatgaccctagaggaggtctgcagccctcaggtccacctcaatttcccccctatcgcggtatgatgcctcccttcatgtatcccccctatctccccttccctcctccatacggacctcaagggccgtatcggtacccgacacccgacgggccttctagatttcccagagtggccggacctcgtggtagtgggccccctatgcggctagtcgaaccggttggacggccgagcatcttgaaggaagataatttaaaggagttcgaccagctggatcaagaaaatgacgacggatgggcaggcgcacatgaagaggttgattacaccgagaagctcaagttctccgacgaagaggacggcagggactccgatgaggaaggagcagaaggtcatagagattcccagtctgctagtggagaggagagacccccagaggcagacgggaagaagggcaatagtccaaattcagagccccctaccccaaaaaccgcttgggccgaaacctccaggcctcccgagaccgaacctggaccccccgcccccaaacccccgctgcccccccctcacaggggtccagcaggaaactggggcccccctggagattaccctgatagaggcggcccaccatgcaagcccccggcccccgaagatgaggacgaagcatggaggcagaggcgcaagcagagttcatctgaaataagtctggcagtagaaagggctcggcggagacgagaagaagaggaaaggaggatgcaggaggagaggagagctgcgtgcgcagagaagcttaaaagactggatgagaagttcggggccccagacaaaaggctcaaggccgaacctgccgctccaccggccgcaccttcgaccccggcaccacctcctgcggtgcctaaagaactgcccgctccccctgctccaccacccgcctcagcgcctacccctgagaccgaacctgaggagcccgcccaagctcccccagcgcagtcgactcctacacccggcgtggccgctgctcccacactcgtaagtggggggggatctacctcttcaaccagctctggcagtttcgaggcctcaccggtcgagccgcagttgccatctaaagagggaccggagcccccagaagaagtcccgccccctaccacacctccagtgcccaaggtggaacctaaaggcgatgggattgggcccacccggcagcctccttcccaggggctgggataccctaagtaccaaaaaagcctgcccccccgcttccagcgccagcaacaggaacagttgctcaagcagcagcaacagcatcagtggcaacagcaccagcaggggtccgccccacctaccccggtacctccatctcctccccagcccgtgactctgggagccgtgcctgctcctcaggcgccgccccctccccccaaggccctttaccctggagcccttgggaggcctccacccatgccccccatgaactttgatccaaggtggatgatgatccctccctatgtggacccccgattgttacaaggccggccgcctctggacttttacccccctggcgtgcacccctcaggcctggtgcctcgagagcgatccgattccggcggctcttcgtcggagcctttcgacagacacgcccctgccatgttgcgagagaggggcaccccccccgtggatcctaaactggcctgggtgggcgatgtgtttactgccacaccagcagaaccccgtccgctcacatcacctctgcgccaggccgccgatgaagatgataaagggatgagatcggagactcctccggtgcctccaccacccccctacctagcttcctatcccgggttccctgaaaacggcgcccctggccctccaatatcacgtttccctctcgaagagcccggcccccggccgctaccatggccacccggctctgatgaagtggcgaaaattcagaccccgcctcccaaaaaggagccgcccaaggaggaaaccgctcagctcactggtcctgaggccggccggaagccagcccgcggagtgggttcaggcgggcagggtccaccacctcctaggagggaaagcagaaccgaaacccggtgggggccccgacccggtagtagtagaagaggtatcccgcctgaggaacctggggccccaccaaggagggcgggtccaataaagaaaccccctccacctaccaaagtcgaggaattgccacctaaacctttggagcaaggggatgaaactcccaagccacccaaacccgatcccttgaagatcaccaagggcaagctgggaggccccaaagagactcctcctaacggtaaccttagcccggccccacggctgcgccgcgattactcctacgaacgggtgggcccaaccagctgcagaggccgcggccgcggggagtatttcgctaggggccgcggctttcgcgggacatatggcggcagaggcaggggggcaagatcaagggagtttaggtcttacagagaatttcgaggtgacgatggacgagggggggggaccggaggccctaatcatccgcctgctcctcggggccggaccgcaagtgaaacgcgatctgagggttccgagtacgaggaaatacccaagcggcgtaggcaacgaggatctgaaaccggctcggaaacccatgagtccgatctagccccttctgacaaggaggcccctacaccgaaagagggaacactgacacaggtacccttggctccccccccacctggggcccccccctcgccagcccctgccagattcacagccaggggcggtcgagtctttacgccaagaggcgttccctcccgccgaggtcgggggggcgggagacctcctccccaagtctgcccaggatggagtccaccagcaaagtcgctcgctcctaagaaaccacctacaggaccactgccaccttcgaaggagccactgaaggagaagctgattccaggaccgctgtcacccgtggcccgcgggggcagcaacgggggcagcaatgtggggatggaagatggcgaaagaccgcgtcggagaagacacgggcgggcccaacagcaggataaacctccccgatttcgaagactgaagcaagaacgtgaaaatgcagcccgaggcagcgaaggcaagcctagcctcaccctgcccgcttccgccccagggcctgaagaggctttgactaccgtgaccgtggcacctgcccccaggcgcgctgccgccaagagccctgatctgagtaatcaaaattccgatcaggcaaacgaggagtgggaaactgccagtgaatcttctgacttcacctccgagcgccgtggcgacaaagaggcccctcccccagtcctcttaaccccaaaggctgtgggcacacctggcggcggtggtggaggcgctgtaccaggtatctcagcgatgtcccgaggcgacctgagccagcgagcgaaagaccttagtaagcgtagcttctccagccaaagaccaggcatggagagacaaaacaggagaccaggaccgggtggcaaggccggctcttctggatcaagcagcggagggggtgggggagggcccgggggtaggaccggcccagggagaggtgacaaaagatcctggccaagtcccaagaacaggagtaggcccccagaagaaagacctcctggccttccgcttccgccaccccctcctagcagcagcgctgtgtttaggttagaccaagtcattcactctaatcctgctgggattcagcaagccttggcccaactcagcagcagacagggaagtgtgacagcccctggcggccatccccggcataagcccgggctgccacaagccccccagggaccatccccacgccctcctactaggtacgaacctcagcgcgtaaatagtggtctgagttctgatccccattttgaggaacccggaccaatggttcgtggtgtcggaggcacgcctcgcgactctgcgggcgttagcccattccctccaaagagacgcgagaggccacctagaaagcctgagctgttacaggaggagtctctacctccaccccacagttccggcttcctgggctctaagcccgagggccccggtcctcaggctgaatcccgcgacacgggtacagaggcactaaccccgcacatctggaacaggctccacactgcgacctcaaggaaatcatatcgcccaagctctatggaaccgtggatggagccactctctcctttcgaagacgtggccggcacggaaatgagtcagagcgactctggcgtagatctgtccggcgattctcaagtaagtagtgggccttgcagccagaggtccagcccagatgggggcttgaagggagccgcagaggggcctccgaaaaggccagggggaagctctcctcttaatgcagttccctgtgagggcccgccggggtctgaacccccgcgcagaccccccccagcaccacatgatggggataggaaagagctccccagagaacaacccctgcctccggggcctatcgggacggagcgcagccagaggaccgaccgggggaccgaacctggaccaatcagaccttcacataggcccggccctcccgtgcagttcggaacctccgacaaggatagtgatctgaggctggtcgtcggagacagcctgaaagcggaaaaagaactgaccgctagcgtgactgaggccatacctgtgagccgcgactgggagcttttgcctagcgcggcagcaagcgcagagcctcagtctaagaatctggatagcggccactgcgttcccgagccctccagcagcggacaacggctgtacccggaggtgttctacggctccgccggcccgtcatcctcccagatttctggcggcgccatggattcgcagctgcacccaaattcaggcgggttccgacctggaaccccgagcttgcatccttacaggtcccaaccactttatctgccccccgggccggcgcctccttccgctcttttgtcaggcgtggcattgaagggccagttcctagactttagtactatgcaggctacagagttaggcaagctgccggccggaggcgtactgtacccgcctccatcctttctttactccccggcgttctgtccatccccactcccggatacaagcctcctccaggttagacaagatctgccttccccttcagacttttactcgactcccctccagccaggcgggcaatcgggattcttaccatccggagccccagcccaacagatgctactgccaatggttgatagtcagctgcccgtagtaaacttcggaagccttccacccgcgcccccacccgcaccacctcctctctctcttttgccagtcgggcccgccctgcagcctccttcattggcagttcgtccgccgcctgcccctgccactcgcgtgttaccttcccccgctagacccttccccgcttctctgggccgagcagagcttcaccccgtcgaattgaaaccatttcaggactaccaaaagctgtcatctaacctgggcgggcccgggtccagcagaaccccaccaacagggagaagcttcagtggtctcaatagccgtctgaaggccacaccctcaacctattccggtgtatttcgtacacagagagtggacctctatcagcaggcctcgccacccgacgcactgcgctggattccaaaaccgtgggagcggacagggccccctccaagagaaggcccctcccggcgcgcagaggaacctgggtcccgaggagataaggagcccgggctccctccgcctagatag

SEQ ID NO: 344911 - DNA, 6450 bp, Artificial Sequence
  derived and/or modified sequence
atgtctgatcggtcaggtcctactgcaaagggaaaagacggaaaaaagtactcttcacttaacctgtttgacacctataagggaaagtctttagaaattcagaagcccgccgtcgcacctcgccacggattgcagtctcttggcaaagtagccatagctagacgcatgccaccaccagccaacctaccctccctgaaggctgagaataaggggaacgatcctaatgtgtccctggtaccgaaggacggcactggatgggccagtaaacaggaacaatctgacccaaaaagttcagatgcttccacagcacagcctccagagtcccaaccactgcccgccagccagaccccagctagcaaccaacctaagaggcctcctgcagcaccagagaatacaccccttgtgccctcaggagtgaaatcttgggctcaggccagcgttacccatggcgcacacggcgacggtgggcgagccagttctttgctgagcagattctcacgagaagaattcccaactcttcaagcagctggcgaccaggacaaggcagccaaggaacgcgagtccgctgaacagagcagtgggccgggcccaagtctccggccccaaaacagcaccacatggcgtgacggtggggggcggggtccagatgagctggaaggtcctgactctaagctgcaccacgggcatgatccccgtggtggccttcagccaagtggccctccacagttccctccctacagaggaatgatgcctccatttatgtatccaccatatctgccatttccacctccgtatggtccccaagggccataccgttatcccacgcccgacgggcccagccgctttccccgggtggccgggccgcgggggagcgggccacccatgagactagttgagcctgtgggcaggccaagcatcctcaaggaggataacctgaaggagtttgatcagctcgatcaagagaatgacgacggctgggcaggcgcacacgaagaagtggattacacagagaagcttaagttcagtgatgaggaggatggtagagactccgacgaagagggggcggaggggcatagggacagtcaaagcgctagtggggaagagaggcctccagaggctgatggcaagaaaggtaactccccaaactcagaacccccgactccaaagacagcctgggccgagacatccaggccacctgaaaccgaacccggtccaccagctcccaaaccacccttaccacctccgcaccgtggccccgccggaaactggggcccgcctggcgattaccctgataggggtggtccgccatgtaagccgcctgctcccgaggacgaggacgaggcgtggaggcagcgccggaagcaaagctcttccgagatttccttggccgtggagcgcgctaggcgtcgtagagaagaagaggagcgtcgcatgcaggaggaaaggcgtgccgcgtgcgctgagaagcttaaacgactggacgagaagttcggcgctcccgataagaggctgaaggctgaacctgccgctccaccagccgctccaagcacacccgccccccctcctgcagttcctaaggaattgcccgccccccctgcccctccgccagcatccgccccgaccccagaaacagagccagaagagcctgctcaggcccccccagcccagtccacccctaccccaggtgttgccgccgcaccaactttagtaagcggagggggatccacttcctcaacatcctccggctcatttgaggcgtccccggtagagccccaactgccttccaaagagggtccagagccccctgaagaagtccccccacccacgaccccgcctgtgcccaaggtagagcctaaaggggacggtatcggtcctacaagacaacccccttcccaggggcttgggtatccaaagtatcagaaatccctgcctcctagattccaacgccagcagcaggagcagctgctgaaacagcagcagcagcaccaatggcagcagcaccagcagggatccgctcccccaaccccagtgccaccatccccccctcagccagtgaccctgggagctgtccctgcgccccaggctccaccaccacctcccaaggctctgtacccaggcgcactggggagacctccaccaatgcctcctatgaatttcgacccgaggtggatgatgatccccccatatgtcgacccacgcctgcttcaggggcggcctccactggacttctatcctcccggagtccacccctctggcctggtgccccgcgaaaggagcgactcgggcggcagctcgtcagagccgttcgatcggcacgccccagcaatgctccgagagaggggcacgcctcccgtcgaccccaaactggcgtgggtgggggacgtgtttacagctacacccgccgagccaagaccattgacttctccgctgaggcaggccgcagatgaagacgacaaaggtatgagaagtgagacacctcccgtgcctccgccgcccccatatctggcctcctaccccgggttccccgaaaacggcgcacccgggcctccaattagccggttcccactcgaagagccaggtcctcggccccttccctggccaccaggtagtgacgaggtagctaagattcagacgcccccccctaagaaagaaccccctaaagaggaaactgcccagctgactggccccgaagccggtcggaaacctgctaggggtgttgggtcaggcggccaaggaccaccacccccgcggcgtgaaagcaggaccgagacacgctgggggcctagaccgggcagcagccgacgcggtatccccccggaagaacctggggcaccacctcggcgggctgggccaatcaagaagccccccccaccaacaaaagttgaggagctgcccccaaaacctttagaacagggagatgagacacccaaaccacccaagcccgacccgcttaagattacaaaagggaagctcggtgggccaaaagaaacaccaccaaatggcaatttgagccctgccccgcggctgcgccgggactactcctacgagagggtcggccctaccagctgtcgtgggcgcggccgaggcgagtatttcgcgcgtggacggggtttccggggaacctatgggggccgcggccggggcgctgccgggaacagtgccgtgacagagtcttttgaagagatgatgggcgtcgaggtcgggcagggcgatcagacgactctactcctgccagaagcagcactgccggcccgccatggagccagggtgcagtctatgaggaagagcccttctggcgctgggtcaggtgctcaaaagcaagctgcaagacctatgcgcgtcatctggctactgcaaacaaggagacttccccacccaaggcgcgagcactcccccagatctcgatctcccaccactcgatcacccacgtttcctgctcccgctagattcactcccggcgtgggggagagctcacttccagagggcatctcccccggaccccgacgtcgcgaaccacctcaggtatgccccgggtggagtccgccagccaaatcactggcccctaaaaagccaccaacagggcctctgcccccttccaaagagcccctgaaggagaagctcattcccggaccactctctcccgtagcaaggggggggtccaacggagggagcaacgtgggaatggaggacggcgaacgcccgcgacggagacggcacggccgagcgcaacaacaggataaaccgcctagattccgacgcctgaaacaggagcgcgaaaacgcagccaggggctctgagggcaaaccgtccttgaccctgcctgctagcgctccaggcccagaggaagccctgactaccgtcaccgtcgcgcctgccccccggagagcagcggccaagtccccagatctgtccaatcagaattcagatcaggccaacgaggagtgggagaccgctagcgagagtagcgactttacatccgagagaaggggggataaggaggcccccccacccgtgctactgacaccaaaagctgtgggcacccccggcggcggcggggggggagccgtgcccggcatctccgctatgtctcgcggagacttgtcccagcgcgccaaagatttatctaaacgctccttttccagtcagaggcctggcatggagcgccagaaccgccggcctggtccaggcggaaaagccgggtcttccgggagctccagcggggggggcggcgggggtccgggcggcagaaccggcccggggagaggcgataagcggtcctggccatctcctaaaaacagaagccgtccaccagaggaacgcccacccggtttgcccttacccccccccccaccctcttcctctgccgtgttcagattggatcaggttatccactccaatcctgccggcatccagcaggccctcgctcagctgtcctctcgccaggggagtgttactgcacctgggggacatccccgccacaagccagggctccctcaagctccacaaggcccttctccccggcctcccacccgctacgagccccagcgagttaatagcggtctgagttcagacccccattttgaagaacctggccccatggtcaggggggtggggggtacacctagagatagcgccggggtatcacccttcccgcctaaaagaagggaacgtccccctcggaaaccagagctgctacaggaagaatctctgcctcctccacacagcagtgggtttttgggttctaagccagagggaccaggcccccaagcagaatctagagacacaggaacggaagcattgaccccccatatctggaacaggttacacacagctaccagccgaaaatcgtacagaccaagctctatggaaccatggatggagccactaagccctttcgaggatgtcgctggcacagagatgtcacagtcagattctggagtggacctctccggcgatagtcaagtatcatcaggaccctgttctcagcgatcctcacctgacggcgggctcaaaggtgcagctgaaggcccgcccaagcggcctggagggtcaagcccactcaatgccgtgccctgcgagggacccccagggagcgaaccccccagacgccctcctcctgcgcctcacgacggagacaggaaggaactgcctagagagcagccacttcctccaggacccattgggacggaaagaagccaaaggacagatcggggcaccgaaccgggacctattcggccgtctcacagacccggcccccctgtccagttcggtacctcagataaagactcagacctcagattggtggtgggagactccttgaaggcagagaaagagttgactgcatcagtgacggaagcaatccccgtgtccagagactgggaattgctcccgtccgctgcggcaagtgctgaacctcagtccaaaaatctcgattcagggcactgcgtgcccgaacccagcagctccgggcagagactgtatccagaagtgttttacgggtcggccgggccaagcagctctcagatctctggaggccacggtctatccatcacttctaagcaatggcgccgccctggcacaccttccctccatccttaccgtagccagccactgtatctgccaccagggcccgcccctcccagtgctctgctttcaggtgtggcccttaaagggcagtttctggatttctcaacaatgcaggctacagagttaggaaagctgccggccggtggggttctttatccaccacctagttttctgtattcccccgcgttctgcccatcaccgctgccagatacttccctcctgcaggtacggcaagaccttccctcacccagcgacttctacagcactcccttgcagcccggtggccagtcaggattcttgccatcaggggcccctgcccagcaaatgctgctgcctatggttgactcccagttgcctgtggttaacttcggcagtctgcccccggcccctccacccgccccgccccctctgagcttgctgccggtcggcccagcactgcagcccccctctttggcagtacgccctcctcccgccccagctacgagagttctgccatcaccggcaagaccatttcctgcctccctgggtagggcagaattacaccctgtcgagctgaagccgttccaggattatcagaagctgtcatctaatctcggaggacccggctccagcaggactccccccacaggacggtcatttagtgggttgaattcccgattgaaagcaaccccttccacttattccggggtgttccgcacacagagagttgatctctatcagcaggctagcccaccagatgcgctcagatggatccccaaaccatgggaaagaacaggtccccccccacgcgaggggccatcccgtagagcagaggagccagggagtcggggagataaggaaccaggcttaccacctcccagatag

SEQ ID NO: 344912 - DNA, 6417 bp, Artificial Sequence
  derived and/or modified sequence
atgagcgaccggtctggtcctacagcaaagggtaaggacgggaaaaaatactcttctctcaacctgtttgatacatacaagggaaagtcgctagaaatccaaaagccagctgtcgccccaaggcacggtttgcaatcattaggcaaagtggccatcgctagacgtatgccccccccagcaaacttaccatcactcaaggccgagaataaaggaaatgaccctaacgtgtcactggtcccaaaagacggtaccggatgggcctcgaaacaggagcagtcagacccaaagagcagtgatgcctccaccgcacagcctccagagtcccagccgttgccagcaagccagactcccgcgagcaatcagcccaagcgtccaccagctgccccagagaatacccccctggtcccttctggggtgaagtcatgggcacaggcctctgttacacacggcgcccatggggatggtggccgcgcaagctccctgttgtctagattttcccgggaagagttccctaccctgcaggccgctggcgaccaggacaaagccgccaaggaaagagagtccgcagaacagtcctccggtccaggacctagcctgcgaccccagaatagcaccacctggcgggacggaggcgggcggggacctgatgagctggagggccccgattccaagctccatcatgggcatgacccgaggggcggcttgcagcctagcgggccaccccagtttccaccatatagggggatgatgcctcctttcatgtaccccccttaccttcccttcccaccgccgtacggccctcagggcccatatagatacccaactccagacggccctagccggttccctcgggtagcagggccccggggatccgggccccccatgcgactagtggagccggtcgggcgtcccagcatcttgaaagaggataatttgaaagagtttgaccagctcgatcaagaaaatgatgacggctgggctggggctcacgaggaggttgactatactgagaagctaaagttcagcgatgaggaggatggcagagatagcgacgaggaaggagccgagggccatcgggattcacaatctgcatccggagaggaaaggcctcccgaggcagacggaaagaaaggcaatagccccaattctgagccacccaccccaaagaccgcctgggcagagacaagccggccaccggagaccgagcctggacccccagcacccaaaccacctctgccccctccgggggactaccccgacagagggggcccaccctgcaagcctccagcccctgaagatgaagatgaggcctggcgccaacgccgcaagcaatcaagcagcgagattagcctggccgtagaaagggcgcggcggagacgggaagaagaggaaaggagaatgcaagaggagcggagagccgcctgtgccgagaagttaaagaggctggacgaaaagttcggtgctcctgataagcgcttaaaagccgagcctgccgcaccgcccgcagccccatctactcctgctccgcctcccgccgtgcccaaggaattaccggcccctcccgcacccccgcccgcatcggcccctaccccagagacggaacctgaggagcccgcccaagctccgcctgcccagtccacccccacacccggggtggctgcggcgccaacactggtgagtgggggcggcagcacaagttccacatcttcaggttcgtttgaggcctcccctgtcgagccccagctgccttccaaggaagggcctgaaccacctgaagaggtgcctcctcctacaactccccctgtgcccaaagtggaacccaaaggcgatggaattggaccaacacgccagccacctagccagggattagggtatccgaaataccagaagtcgctgcctcctaggtttcagcgacaacaacaggagcagctcctcaaacagcagcagcagcaccagtggcaacaacaccagcagggctcagctcccccaaccccggtgcctccgtcccctccccagcccgttacactaggcgctgtgccagctccgcaggccccaccgcccccccccaaagctttatacccaggagcattggggaggccccctcccatgccgcccatgaattttgatccccggtggatgatgatccctccctacgtcgatccacgactgctgcagggtcgcccaccacttgacttctacccacctggggtgcatccatcaggcttggttcctcgggagagatcagattctggaggatcctcctctgagccatttgatcgccacgcccctgccatgctccgggagagagggacacctcctgtcgatcctaagctggcttgggtgggcgatgtcttcactgccacgccggcagaaccccgcccattgacatcccctttgcgacaggccgcagacgaagacgacaagggcatgagaagcgagacaccccctgtccctcctccccccccttaccttgccagctatcccggcttccccgaaaacggcgccccggggcccccaatctccagatttccactggaggaacccgggccgaggcctcttccttggccacccgggagcgatgaggtcgcgaaaatccagacccctcctcctaagaaagagcccccaaaagaagagaccgcccagctgactggcccagaagccggccgtaaaccagcccggggagtgggctcagggggccaggggcctccgcccccaaggagagaaagtcgcactgaaactaggtggggtccaaggcccggtagctcacgtagagggatcccacctgaggagcccggcgcaccacctcgaagggccgggccaatcaaaaaacctccccccccgacaaaagtggaggagcttccgcccaagccacttgagcagggtgacgagacaccaaagccaccaaagcccgatcctctcaaaatcacaaagggcaaactcgggggccctaaggaaacaccccccaatgggaacctgagtcctgccccaaggctgcgccgcgactactcatatgagagggtgggccccacgtcctgccgcgggcgcgggcgcggggaatattttgctagaggccggggatttagagggacctacggtggtagaggccgcggcgcggcaggcaatagcgctgtgacagagagctttgaagagatgatgggcgttgaggtcggccaaggagatcaaaccacactgcttctgcccgaggctgccttgcctgccaggcacggggctagggttcagtctatgcgaaagtctcccagcggagcagggtccggggcacagaaacaggccgcaaggcccatgagagtcatatggctattgcaaacgagacggctgccccatcctcgaagggagcactcaccccgctccaggagtccaaccacacgtagtccaaccttccccgcccctgcaagattcacgcccggagtgggggagtcgagtctgcccgaaggaatcagccctgggccgaggcgcagggaaccccctcaggtctgcccaggctggtctccgcctgcaaaaagtctggctcctaagaagcctccaactgggcccctccccccgagtaaggagcctctgaaggaaaagctgattcccggaccactctccccagttgccagaggcggaagcaatggcgggagcaacgtgggaatggaggatggcgagcgcccaagacgccggcgccatggcagagcacagcaacaggacaaaccgccgaggttcagacggcttaaacaagaaagggagaacgcggcaagagggtccgagggcaagccctctctgactctgcctgcttcagcccctggacccgaagaggcactaacaacagtgaccgtggctcccgcaccgagacgcgccgcagctaaatctcctgacctgagtaatcagaatagcgatcaagcaaacgaagaatgggaaacagcctctgagtcctcggacttcacttctgagagacgtggtgataaggaggcacctccccccgttctgctaacaccgaaggcagtaggaacccccggaggaggcggaggcggcgccgtccctggaataagcgcgatgtccagaggcgacctgagccaacgggccaaggatctctccaagcggtcatttagctcacagcgcccgggtatggagaggcagaaccgaagaccaggccctggtggcaaggctggtagcagcggcagttcatcaggcggtggcggaggaggccctgggggacgcacagggcccggaaggggggacaagcgatcctggcctagcccgaagaatcgttcccgacctccagaagagagaccccctggtctgccactgccaccacctccgccttctagtagtgcggtgttcagactagaccaggtcatacacagcaacccggccggaattcaacaagctctggcccaactgtctagtaggcagggcagtgtaacagccccaggggggcatccgcgccataagcccggacttccacaggcccctcaaggacctagtccacgaccccctacgaggtacgagccacagagggtgaattctggcctcagctccgatcctcattttgaagagcccggaccgatggttagaggtgtaggcggcacaccccgagattcagccggtgtttctccattcccgcccaagcgccgcgagagaccccctcggaagcccgaacttctgcaggaagagagtctgccacctccacatagctctggatttctgggatcaaaacccgaagggcccggaccacaggctgagagtagagacactggaacggaagctctcacacctcacatatggaatcgtttacacaccgctaccagccgcaagagctatcgtcctagcagtatggagccctggatggaacccttgtcccccttcgaggacgtggcagggacggagatgagccagtccgattctggtgtcgacctgagtggcgacagccaggtgtcttccggcccctgtagtcaacggagctcgcccgacggtggactaaagggagcagcagagggccctccaaagcgtcctggtggtagctcccctttgaacgccgtgccatgcgaaggccctcctgggtcagagcctccacggcggccaccccctgccccgcacgacggcgatcgcaaggaactgccaagggaacagccactgccccccggacctataggcaccgagcggagccaacgaacagatcggggcaccgagccggggccaataaggccatcccatcgaccaggaccacccgtgcaattcggtaccagtgacaaagacagcgatctacgcctcgtcgtgggagacagtctgaaggcagagaaagagctaaccgcctcagtgactgaggccatccccgtgagcagagattgggaactccttccaagcgcagcagcttcggccgagccccagagcaagaatctcgattctggtcactgcgtgccggagccttcttcgtcaggacagaggctttacccagaggttttttacggctccgctggaccatctagttcccagatcagcgggggccacggcctgtcgattactagtaagcagtggcggagacctggtactcccagcctgcacccttaccgaagtcagcccctgtatttacctcctggtcccgcccccccttccgcactgctgtctggcgtcgcactgaagggacaattcctcgatttttcgaccatgcaagcaaccgagctgggaaagctaccagccggcggcgtgctgtacccaccacccagctttttatacagtcctgcattttgtccgagcccactgccagacactagcctcctgcaggttagacaggacctgccatcaccttctgatttctactcaacacctctgcagcccggcggtcaatccgggtttttaccatcaggagcgccagcccagcagatgctgctcccaatggtcgactcccagctgccagtggtgaattttggttccctgcccccggctccacccccagcaccaccaccattgtctcttctgcccgtgggtccggccctccagccaccatcgctggctgtgcgtccacctccagctcccgcaactagggtgctacctagtccggcgagacctttccctgcatcattgggccgcgcggagttgcacccagtggagctcaagccattccaggactaccagaagctgagctctaacctgggggggcccggctcatccaggacgccaccaaccggtcgatcgtttagtggtctcaacagtcggttgaaagctacgccttctacctattccggggtctttagaacacagcgagtggatctctaccagcaggcaagccctccagatgccctgcgctggatccccaaaccctgggagcgaaccggtccgccccctcgtgagggtccctctaggcgggctgaggagccaggaagtcggggagataaggagcccggcctgccaccgcctaggtag

SEQ ID NO: 344913 - DNA, 4149 bp, Artificial Sequence
  derived and/or modified sequence
atgctccgggagaggggcaccccgccagttgacccaaaattggcttgggtcggcgatgtctttaccgccactcccgctgaaccaaggccgctcacatctcccctccgccaggctgcggacgaagatgacaaaggaatgaggtctgaaacaccccccgtgccgccaccccctccttatctcgccagctatcccggattcccggagaacggggcgccaggtcctccaatatcacggtttcctctggaggagcccggccctcgcccactcccctggcccccagggtccgatgaagtcgctaagattcaaacaccccccccgaaaaaggagccacctaaagaagagactgcccagcttaccgggcctgaggcagggcgcaagcctgccaggggggtcggttccggtggtcaagggcccccaccccctcgccgcgaatcaaggacagagaccagatggggccctcgccccggatcctccaggagagggattccccctgaagagcctggcgctcctcccagacgcgcggggccaataaagaagcctccccctccaacaaaggtcgaagaactgccacccaaacccctggaacaaggggacgagaccccaaaacctccaaagccagatcctctcaaaatcacaaaagggaagcttggtgggcccaaggagacacctccaaacggaaatctgagccccgctcctcgtttaagaagagattactcatacgagcgcgtggggccaacttcgtgccgaggacgtgggagaggagaatatttcgctcgcggtagaggcttccgcggaacgtatggaggaaggggacgaggggcacgatcccgggaattccgctcttatagagagttccgcggcgatgacggcagaggagggggtaccggcggtccaaatcacccacctgccccacgtggaaggaccgccagtgagacgagatccgaaggatcagagtacgaagaaatccccaagaggcggcgacagcggggctccgaaaccggaagcgaaacacacgaatcagatctggccccttccgacaaggaggccccaactcccaaagaaggcactttaacgcaggtgcccctagcccccccgccgcctggggctccacccagccctgcgcccgccagatttacggccagggggggtagagtgtttactcctcggggggttccctcccgaagaggccgcgggggcggcagaccaccccctcaggtgtgtcccggctggagccctccagcaaaaagtctggcacccaagaagcccccaaccggaccgctgccaccatcaaaagagccacttaaggagaagctaattccggggcccctatcccctgtggctagaggaggaagcaatggaggctcgaatgtgggtatggaagacggcgagcgccctcgcagacgccgacacggaagagctcagcaacaagataagcccccccgttttagacgcttgaagcaggaacgagagaatgccgctcggggctccgaaggaaaaccaagtctgactctgcctgcatctgcgcccggtccagaagaagctctgacaacagttaccgtggcccccgctccgcgtcgcgctgcagccaagagtccagatttgagtaaccagaactcagaccaggcaaatgaagagtgggagaccgcatccgaaagttccgacttcacttcagagaggcgtggcgataaggaggctcctcctccagttctgttgacccccaaagcagtgggcaccccagggggaggtgggggcggcgccgtacccggcatcagcgcaatgtccagaggggatctgtcacaacgcgcaaaggacctgtcgaagagatcctttagctctcagcggcctgggatggagcggcaaaaccgcagaccaggcccaggcggaaaggcaggatcatcggggagctcctccggtggtggaggcggcggccccggaggccgcaccgggccaggccggggcgacaagagaagttggccaagcccaaagaaccgttctaggccccccgaggaacggccacctggcctgcccctaccgcctcccccgcctagttcgtcagccgtgttccggcttgaccaagtcattcattctaacccagccggcattcaacaggcactcgctcaactgtcttcccgacagggatcagtcaccgcacctggcggccacccacgtcacaagcccgggctgcctcaggcccctcagggcccttctcctagacccccaacacgctatgagccacagcgggttaattccggactgagctccgatccgcatttcgaggaacccggcccaatggtaaggggcgtgggcggaactccaagagacagcgctggtgtgagtccattcccccccaaaagacgggagcggccaccccgaaagccagagctgctccaagaggaatcactccctccgccacattccagtggttttctgggttccaagcccgaaggtccgggccctcaggcggaatctcgagacacaggcacggaagcactgacccctcacatttggaatcgcctgcacactgcgacaagtaggaagtcttatcggccatcgagcatggagccgtggatggaacccctctcgccatttgaagatgtagccggaaccgaaatgtctcagagcgactcgggtgtagatttaagcggcgactcacaggtgtcatctggcccttgcagccagcggagctccccagacggaggcctgaagggagcagccgagggcccaccaaaaagacccggcggaagcagtccacttaacgcagtcccttgcgagggacctcccggctcagagcctccgaggcgccctcctccagccccgcatgacggcgatagaaaagaattgcctcgagaacagcccctaccccctgggcctatcgggacagagcggagtcagcgtaccgatcgtggtaccgaaccgggccccattcgtccttcgcaccgcccaggcccaccggtgcaatttggaacatcggacaaagacagcgatctgaggctggtcgtgggcgatagcttaaaggccgagaaggaactaacggcgtcagtgaccgaagctatcccagtgtccagggactgggagctcctgccaagcgcggctgcatccgcagaaccgcagtcaaagaatctggattctgggcattgtgtgcccgaaccctccagttccggacagcggctctaccccgaagttttctatggttccgccgggcctagtagttcccaaatcagcggcggcgcaatggactcccagctacacccaaatagtggaggtttccgccccggaaccccctccctacacccttacagatcccaacccctgtatctgccaccaggacctgcccctccatccgccctcctcagcggggtcgccctgaagggccaatttctggactttagtactatgcaggctaccgagttagggaagcttcccgccggaggggtgctctatcccccacccagcttcctctattcccctgcattttgtccctcacccctcccagataccagcctgcttcaagtaaggcaggacttgccgagcccttcagatttttactcaaccccattacagcctggcggccagagtggattcctcccatcgggggcacctgcccaacagatgttgttacctatggtggactcccagctgccggtcgttaactttggaagccttcctcccgcgcctcccccagctcccccaccactgagcctcctccccgtgggtcctgccctccaacccccaagcttggccgtgcgtccaccacccgccccagcgacaagagtcctcccaagccctgcaagaccttttccagcctccctggggcgcgccgaacttcatcctgtagaactgaagccctttcaagattaccaaaaactgtcctctaacttagggggccccggaagtagcagaacccctcccactgggcgcagctttagtggactgaacagccgcctgaaagccacaccaagcacttattccggtgtttttcgaacgcagagagtggacctctaccagcaggcaagtccgcctgacgccctgcggtggataccaaagccctgggagcgcacaggtccaccgccgagagagggtccatcccgtcgggccgaggaaccgggcagccgcggggataaagagccaggtctgccgcctcctagatag

SEQ ID NO: 344914 - DNA, 6474 bp, Artificial Sequence
  derived and/or modified sequence
atgtctgacagaagtggccccacagccaagggcaaggatggcaagaagtacagcagcctgaacctgtttgacacctacaagggcaagagcctggagatccagaagccagctgtggcccccaggcatggcctgcagagcctgggcaaggtggccatcgcccggaggatgcctcctccagccaacctgcccagcctgaaggccgagaacaagggaaatgaccccaacgtgtccctggtgcccaaggatggcaccggctgggccagcaagcaggagcagagcgaccccaagagcagtgatgccagcacagcccagcccccagagagccagcccctgcctgccagccagaccccagccagcaaccagcccaagaggcctcctgctgcccctgagaacacccccctggtgcccagcggcgtgaagtcctgggcccaggcctctgtgacccatggagcccatggagatggcggccgggccagcagcctgctgagccgcttcagccgggaggagttccccaccctgcaggccgccggggaccaggacaaggccgccaaggagcgggagagcgctgagcagagcagcggccctggccccagcctgcggccccagaacagcaccacctggagagatggcggcggccggggcccagatgagctggagggccctgacagcaagctgcaccacggccatgacccccggggcggcctgcagcccagcggccccccccagttccccccctaccggggcatgatgccacccttcatgtacccaccctacctgcccttccccccaccctacggcccccagggcccctaccgctaccccaccccagatggccccagccgcttcccccgggtggccggcccccggggcagcggcccccccatgaggctggtggagcctgtgggccggcccagcatcctgaaggaggacaacctgaaggagtttgaccagctggaccaggagaatgatgatggctgggccggggcccacgaggaggtggactacacagagaagctgaagttcagtgatgaagaagatggccgggacagtgatgaggagggcgctgagggccaccgggacagccagagcgccagcggggaggagcggcccccagaggctgatggcaagaagggcaacagccccaacagcgagccccccacccccaagacagcctgggccgagaccagccggcccccagagacagagcccggccccccagcccccaagccacccctgcccccaccccaccggggccctgctggcaactggggccccccaggggactacccagacagaggaggccccccctgcaagcccccagccccagaagatgaagatgaggcctggaggcagaggaggaagcagagcagcagcgagatcagcctggccgtggagcgggccaggagaagaagagaggaggaggagaggaggatgcaggaggagcggcgggccgcctgtgccgagaagctgaagaggctggatgagaagtttggagccccagacaagaggctgaaggccgagcctgctgcccctcctgctgcccccagcaccccagcccctcctcctgctgtgcccaaggagctgcctgcccccccagcccctcctccagccagcgcccccaccccagagacagagcctgaggagcccgcccaggcccccccagcccagagcacccccaccccaggagtggccgccgcccccaccctggtgtctgggggcggcagcaccagcagcaccagcagcggcagctttgaggccagccctgtggagccccagctgcccagcaaggagggccctgagcccccagaggaggtgcccccacccaccaccccacctgtgcccaaggtggagcccaagggagatggcatcggccccacccggcagccccccagccagggcctgggctaccccaagtaccagaagagcctgcccccacgcttccagaggcagcagcaggagcagctgctgaagcagcagcagcagcaccagtggcagcagcaccagcagggcagcgccccacccacccctgtgccccccagccccccccagcctgtgaccctgggcgctgtgcctgccccccaggcccctcctcctccacccaaggccctgtacccaggggccctgggccggcccccacccatgccacccatgaactttgacccccgctggatgatgatccccccctacgtggacccccggctgctgcagggccggccccccctggacttctacccacctggggtgcaccccagcggcctggtgccccgggagaggagtgacagcggcggcagcagcagcgagccctttgacagacatgccccagccatgctgcgggagcggggcaccccacctgtggaccccaagctggcctgggtgggagatgtgttcaccgccaccccagctgagccccggcccctgaccagccccctgcggcaggccgcagatgaagatgacaagggcatgaggtctgagaccccacctgtgcccccacctccaccctacctggccagctacccaggcttcccagaaaatggagcccctggcccccccatcagccgcttccccctggaggagcccggcccccggcccctgccctggcccccaggcagtgatgaggtggccaagatccagaccccaccacccaagaaggagccccccaaggaggagacagcccagctgaccggccctgaggccggcaggaagccagcccggggcgtgggcagcggcggccagggccccccacctccaagaagagagagcaggacagagacccgctggggcccccggcccggcagcagccggcggggcatccccccagaggagcccggggcccccccaagaagagctggccccatcaagaagcccccaccacccaccaaggtggaggagctgccccccaagcccctggagcagggagatgagacccccaagccacccaagccagaccccctgaagatcaccaagggcaagctgggcggccccaaggagaccccacccaacggcaacctgagccctgccccccggctgcggcgggactacagctatgagcgggtgggccccaccagctgccggggccggggccgcggggagtactttgcccggggccggggcttccggggcacctacggcggccggggccgcggggcccggagccgggagttccgcagctaccgggagttcagaggagatgatggccggggcggcggcaccggcggccccaaccaccccccagccccccggggccgcacagccagcgagaccaggtctgagggctctgaatatgaggagatccccaagagaagacggcagaggggcagcgagaccggcagcgagacccatgaaagtgacctggcccccagcgacaaggaggcccccacccccaaggagggcaccctgacccaggtgcccctggcccctcctcctcctggggccccacccagccctgccccagcccgcttcaccgcccggggcggccgggtcttcaccccccggggcgtgcccagcagaagaggccggggcggcggccggcccccaccccaggtgtgccccggctggagccccccagccaagagcctggcccccaagaagcccccaacaggccccctgccccccagcaaggagcccctgaaggagaagctgatccctggccccctgagccctgtggcccggggcggcagcaatggaggcagcaatgtgggcatggaggatggagagcggcccaggagaagaagacatggccgggcccagcagcaggacaagccaccccgcttccggcggctgaagcaggagagagaaaatgctgcccggggcagcgagggcaagcccagcctgaccctgcctgccagcgcccctggccctgaggaggccctgaccaccgtgacagtggccccagccccccggcgggctgctgccaagagcccagacctgagcaaccagaacagcgaccaggccaatgaggagtgggagacagccagcgagagcagtgacttcaccagcgagcggcggggggacaaggaggcccctcctcctgtgctgctgacccccaaggctgtgggcacccctgggggcggcggcggcggcgctgtgcccggcatcagcgccatgagcagaggagacctgagccagagggccaaggacctgagcaagaggagcttcagcagccagaggcctggcatggagcggcagaacagaagacctggccctgggggcaaggccggcagcagcggcagcagcagcggcggcggcggcggcggccctgggggccgcactggacctggccgcggggacaagaggtcctggcccagccccaagaacagaagccggcccccagaggagaggcctcctggcctgcccctgcccccacctccacccagcagcagcgctgtgttccggctggaccaggtgatccacagcaacccagctggcatccagcaggccctggcccagctgagcagccggcagggctctgtgacagcccctgggggccaccccaggcacaagccaggcctgccccaggccccccagggccccagcccccggccccccaccaggtatgagccccagagggtgaacagcggcctgagcagtgacccccactttgaggagcccggccccatggtgcggggcgtgggcggcaccccccgggacagcgctggggtgagccccttcccccccaagaggcgggagcggccccccaggaagccagagctgctgcaggaggagagcctgcccccaccccacagcagcggcttcctgggcagcaagccagagggccctggcccccaggccgagagccgggacacaggaacagaggccctgaccccccacatctggaaccggctgcacacagccaccagcaggaagagctaccggcccagctccatggagccctggatggagcccctgagcccctttgaagatgtggccggcacagagatgagccagagcgacagcggcgtggacctgagcggggacagccaggtgagcagcggcccctgcagccagaggagcagcccagatggcggcctgaagggagctgctgagggcccccccaagaggcctgggggcagcagccccctgaatgctgtgccctgtgagggccccccaggcagcgagcccccccggcggcccccaccagcccctcatgatggagacaggaaggagctgccccgggagcagcccctgcccccaggccccatcggcacagagaggagccagaggacagaccggggcacagagcccggccccatccggcccagccaccggcccggcccccctgtgcagtttggcaccagtgacaaggacagcgacctgcggctggtggtgggggacagcctgaaggccgagaaggagctgacagcctctgtgacagaggccatccctgtgtcccgggactgggagctgctgcccagcgctgctgccagcgctgagccccagagcaagaacctggacagcggccactgtgtgcctgagcccagcagcagcggccagaggctgtacccagaggtgttctacggcagcgctggccccagcagcagccagatctctggaggagccatggacagccagctgcaccccaacagcggcggcttccggcccggcacccccagcctgcacccctaccgcagccagcccctgtacctgcccccaggccctgcccctccttctgccctgctgtctggagtggccctgaagggccagttcctggacttcagcaccatgcaggccacagagctgggcaagctgcctgctggaggagtgctgtaccccccacccagcttcctgtacagccctgccttctgccccagccccctgcctgacaccagcctgctgcaggtgcggcaggacctgcccagccccagcgacttctacagcacccccctgcagcccggcggccagagcggcttcctgcccagcggggccccagcccagcagatgctgctgcccatggtggacagccagctgcctgtggtgaactttggcagcctgcccccagcccctcctccagcccccccacccctgagcctgctgcctgtgggccctgccctgcagccccccagcctggccgtgcggcccccaccagccccagccaccagggtgctgcccagccctgcccggcccttccctgccagcctgggccgggcagagctgcaccctgtggagctgaagcccttccaggactaccagaagctgagcagcaacctgggcggccctggcagcagcaggaccccacccaccggccgctccttcagcggcctgaacagccggctgaaggccacccccagcacctacagcggggtcttccgcacccagagggtggacctgtaccagcaggccagccccccagatgccctgcgctggatccccaagccctgggagaggacaggccccccaccccgggagggccccagccggcgggcagaggagcccggcagcagaggagacaaggagcccggcctgcccccaccaagatag

SEQ ID NO: 344915 - DNA, 6450 bp, Artificial Sequence
  derived and/or modified sequence
atgtctgacagaagtggccccacagccaagggcaaggatggcaagaagtacagcagcctgaacctgtttgacacctacaagggcaagagcctggagatccagaagccagctgtggcccccaggcatggcctgcagagcctgggcaaggtggccatcgcccggaggatgcctcctccagccaacctgcccagcctgaaggccgagaacaagggaaatgaccccaacgtgtccctggtgcccaaggatggcaccggctgggccagcaagcaggagcagagcgaccccaagagcagtgatgccagcacagcccagcccccagagagccagcccctgcctgccagccagaccccagccagcaaccagcccaagaggcctcctgctgcccctgagaacacccccctggtgcccagcggcgtgaagtcctgggcccaggcctctgtgacccatggagcccatggagatggcggccgggccagcagcctgctgagccgcttcagccgggaggagttccccaccctgcaggccgccggggaccaggacaaggccgccaaggagcgggagagcgctgagcagagcagcggccctggccccagcctgcggccccagaacagcaccacctggagagatggcggcggccggggcccagatgagctggagggccctgacagcaagctgcaccacggccatgacccccggggcggcctgcagcccagcggccccccccagttccccccctaccggggcatgatgccacccttcatgtacccaccctacctgcccttccccccaccctacggcccccagggcccctaccgctaccccaccccagatggccccagccgcttcccccgggtggccggcccccggggcagcggcccccccatgaggctggtggagcctgtgggccggcccagcatcctgaaggaggacaacctgaaggagtttgaccagctggaccaggagaatgatgatggctgggccggggcccacgaggaggtggactacacagagaagctgaagttcagtgatgaagaagatggccgggacagtgatgaggagggcgctgagggccaccgggacagccagagcgccagcggggaggagcggcccccagaggctgatggcaagaagggcaacagccccaacagcgagccccccacccccaagacagcctgggccgagaccagccggcccccagagacagagcccggccccccagcccccaagccacccctgcccccaccccaccggggccctgctggcaactggggccccccaggggactacccagacagaggaggccccccctgcaagcccccagccccagaagatgaagatgaggcctggaggcagaggaggaagcagagcagcagcgagatcagcctggccgtggagcgggccaggagaagaagagaggaggaggagaggaggatgcaggaggagcggcgggccgcctgtgccgagaagctgaagaggctggatgagaagtttggagccccagacaagaggctgaaggccgagcctgctgcccctcctgctgcccccagcaccccagcccctcctcctgctgtgcccaaggagctgcctgcccccccagcccctcctccagccagcgcccccaccccagagacagagcctgaggagcccgcccaggcccccccagcccagagcacccccaccccaggagtggccgccgcccccaccctggtgtctgggggcggcagcaccagcagcaccagcagcggcagctttgaggccagccctgtggagccccagctgcccagcaaggagggccctgagcccccagaggaggtgcccccacccaccaccccacctgtgcccaaggtggagcccaagggagatggcatcggccccacccggcagccccccagccagggcctgggctaccccaagtaccagaagagcctgcccccacgcttccagaggcagcagcaggagcagctgctgaagcagcagcagcagcaccagtggcagcagcaccagcagggcagcgccccacccacccctgtgccccccagccccccccagcctgtgaccctgggcgctgtgcctgccccccaggcccctcctcctccacccaaggccctgtacccaggggccctgggccggcccccacccatgccacccatgaactttgacccccgctggatgatgatccccccctacgtggacccccggctgctgcagggccggccccccctggacttctacccacctggggtgcaccccagcggcctggtgccccgggagaggagtgacagcggcggcagcagcagcgagccctttgacagacatgccccagccatgctgcgggagcggggcaccccacctgtggaccccaagctggcctgggtgggagatgtgttcaccgccaccccagctgagccccggcccctgaccagccccctgcggcaggccgcagatgaagatgacaagggcatgaggtctgagaccccacctgtgcccccacctccaccctacctggccagctacccaggcttcccagaaaatggagcccctggcccccccatcagccgcttccccctggaggagcccggcccccggcccctgccctggcccccaggcagtgatgaggtggccaagatccagaccccaccacccaagaaggagccccccaaggaggagacagcccagctgaccggccctgaggccggcaggaagccagcccggggcgtgggcagcggcggccagggccccccacctccaagaagagagagcaggacagagacccgctggggcccccggcccggcagcagccggcggggcatccccccagaggagcccggggcccccccaagaagagctggccccatcaagaagcccccaccacccaccaaggtggaggagctgccccccaagcccctggagcagggagatgagacccccaagccacccaagccagaccccctgaagatcaccaagggcaagctgggcggccccaaggagaccccacccaacggcaacctgagccctgccccccggctgcggcgggactacagctatgagcgggtgggccccaccagctgccggggccggggccgcggggagtactttgcccggggccggggcttccggggcacctacggcggccggggcagaggagctgctggcaacagcgctgtgacagagagctttgaggagatgatgggcgtggaggtgggccagggcgaccagaccaccctgctgctgcctgaggccgccctgcctgcccggcacggggcccgggtgcagagcatgaggaagagccccagcggggccggcagcggggcccagaagcaggccgcccggcccatgagggtcatctggctgctgcagacccggcggctgccccacccccggcgggagcacagccccaggagccgcagccccaccaccaggagccccaccttccctgccccagcccgcttcaccccaggagtgggggagagcagcctgcctgagggcatcagccctggccccaggagaagagagcccccccaggtgtgccccggctggagccccccagccaagagcctggcccccaagaagcccccaacaggccccctgccccccagcaaggagcccctgaaggagaagctgatccctggccccctgagccctgtggcccggggcggcagcaatggaggcagcaatgtgggcatggaggatggagagcggcccaggagaagaagacatggccgggcccagcagcaggacaagccaccccgcttccggcggctgaagcaggagagagaaaatgctgcccggggcagcgagggcaagcccagcctgaccctgcctgccagcgcccctggccctgaggaggccctgaccaccgtgacagtggccccagccccccggcgggctgctgccaagagcccagacctgagcaaccagaacagcgaccaggccaatgaggagtgggagacagccagcgagagcagtgacttcaccagcgagcggcggggggacaaggaggcccctcctcctgtgctgctgacccccaaggctgtgggcacccctgggggcggcggcggcggcgctgtgcccggcatcagcgccatgagcagaggagacctgagccagagggccaaggacctgagcaagaggagcttcagcagccagaggcctggcatggagcggcagaacagaagacctggccctgggggcaaggccggcagcagcggcagcagcagcggcggcggcggcggcggccctgggggccgcactggacctggccgcggggacaagaggtcctggcccagccccaagaacagaagccggcccccagaggagaggcctcctggcctgcccctgcccccacctccacccagcagcagcgctgtgttccggctggaccaggtgatccacagcaacccagctggcatccagcaggccctggcccagctgagcagccggcagggctctgtgacagcccctgggggccaccccaggcacaagccaggcctgccccaggccccccagggccccagcccccggccccccaccaggtatgagccccagagggtgaacagcggcctgagcagtgacccccactttgaggagcccggccccatggtgcggggcgtgggcggcaccccccgggacagcgctggggtgagccccttcccccccaagaggcgggagcggccccccaggaagccagagctgctgcaggaggagagcctgcccccaccccacagcagcggcttcctgggcagcaagccagagggccctggcccccaggccgagagccgggacacaggaacagaggccctgaccccccacatctggaaccggctgcacacagccaccagcaggaagagctaccggcccagctccatggagccctggatggagcccctgagcccctttgaagatgtggccggcacagagatgagccagagcgacagcggcgtggacctgagcggggacagccaggtgagcagcggcccctgcagccagaggagcagcccagatggcggcctgaagggagctgctgagggcccccccaagaggcctgggggcagcagccccctgaatgctgtgccctgtgagggccccccaggcagcgagcccccccggcggcccccaccagcccctcatgatggagacaggaaggagctgccccgggagcagcccctgcccccaggccccatcggcacagagaggagccagaggacagaccggggcacagagcccggccccatccggcccagccaccggcccggcccccctgtgcagtttggcaccagtgacaaggacagcgacctgcggctggtggtgggggacagcctgaaggccgagaaggagctgacagcctctgtgacagaggccatccctgtgtcccgggactgggagctgctgcccagcgctgctgccagcgctgagccccagagcaagaacctggacagcggccactgtgtgcctgagcccagcagcagcggccagaggctgtacccagaggtgttctacggcagcgctggccccagcagcagccagatcagcggcggccacggcctgagcatcaccagcaagcagtggaggcggcccggcacccccagcctgcacccctaccgcagccagcccctgtacctgcccccaggccctgcccctccttctgccctgctgtctggagtggccctgaagggccagttcctggacttcagcaccatgcaggccacagagctgggcaagctgcctgctggaggagtgctgtaccccccacccagcttcctgtacagccctgccttctgccccagccccctgcctgacaccagcctgctgcaggtgcggcaggacctgcccagccccagcgacttctacagcacccccctgcagcccggcggccagagcggcttcctgcccagcggggccccagcccagcagatgctgctgcccatggtggacagccagctgcctgtggtgaactttggcagcctgcccccagcccctcctccagcccccccacccctgagcctgctgcctgtgggccctgccctgcagccccccagcctggccgtgcggcccccaccagccccagccaccagggtgctgcccagccctgcccggcccttccctgccagcctgggccgggcagagctgcaccctgtggagctgaagcccttccaggactaccagaagctgagcagcaacctgggcggccctggcagcagcaggaccccacccaccggccgctccttcagcggcctgaacagccggctgaaggccacccccagcacctacagcggggtcttccgcacccagagggtggacctgtaccagcaggccagccccccagatgccctgcgctggatccccaagccctgggagaggacaggccccccaccccgggagggccccagccggcgggcagaggagcccggcagcagaggagacaaggagcccggcctgcccccaccaagatag

SEQ ID NO: 344916 - DNA, 6417 bp, Artificial Sequence
  derived and/or modified sequence
atgtctgacagaagtggccccacagccaagggcaaggatggcaagaagtacagcagcctgaacctgtttgacacctacaagggcaagagcctggagatccagaagccagctgtggcccccaggcatggcctgcagagcctgggcaaggtggccatcgcccggaggatgcctcctccagccaacctgcccagcctgaaggccgagaacaagggaaatgaccccaacgtgtccctggtgcccaaggatggcaccggctgggccagcaagcaggagcagagcgaccccaagagcagtgatgccagcacagcccagcccccagagagccagcccctgcctgccagccagaccccagccagcaaccagcccaagaggcctcctgctgcccctgagaacacccccctggtgcccagcggcgtgaagtcctgggcccaggcctctgtgacccatggagcccatggagatggcggccgggccagcagcctgctgagccgcttcagccgggaggagttccccaccctgcaggccgccggggaccaggacaaggccgccaaggagcgggagagcgctgagcagagcagcggccctggccccagcctgcggccccagaacagcaccacctggagagatggcggcggccggggcccagatgagctggagggccctgacagcaagctgcaccacggccatgacccccggggcggcctgcagcccagcggccccccccagttccccccctaccggggcatgatgccacccttcatgtacccaccctacctgcccttccccccaccctacggcccccagggcccctaccgctaccccaccccagatggccccagccgcttcccccgggtggccggcccccggggcagcggcccccccatgaggctggtggagcctgtgggccggcccagcatcctgaaggaggacaacctgaaggagtttgaccagctggaccaggagaatgatgatggctgggccggggcccacgaggaggtggactacacagagaagctgaagttcagtgatgaagaagatggccgggacagtgatgaggagggcgctgagggccaccgggacagccagagcgccagcggggaggagcggcccccagaggctgatggcaagaagggcaacagccccaacagcgagccccccacccccaagacagcctgggccgagaccagccggcccccagagacagagcccggccccccagcccccaagccacccctgcccccacctggggactacccagaccggggcggccccccctgcaagcccccagccccagaagatgaagatgaggcctggaggcagaggaggaagcagagcagcagcgagatcagcctggccgtggagcgggccaggagaagaagagaggaggaggagaggaggatgcaggaggagaggagagctgcctgtgccgagaagctgaagaggctggatgagaagtttggagccccagacaagaggctgaaggccgagcctgctgcccccccagctgcccccagcaccccagcccctcctcctgctgtgcccaaggagctgcctgcccccccagcccctcctccagccagcgcccccaccccagagacagagcctgaggagcccgcccaggcccccccagcccagagcacccccaccccaggagtggccgccgcccccaccctggtgtctgggggcggcagcaccagcagcaccagcagcggcagctttgaggccagccctgtggagccccagctgcccagcaaggagggccctgagcccccagaggaggtgcccccacccaccaccccacctgtgcccaaggtggagcccaagggagatggcatcggccccacccggcagccccccagccagggcctgggctaccccaagtaccagaagagcctgcccccacgcttccagaggcagcagcaggagcagctgctgaagcagcagcagcagcaccagtggcagcagcaccagcagggcagcgccccacccacccctgtgccccccagccccccccagcctgtgaccctgggcgctgtgcctgccccccaggcccctcctcctccacccaaggccctgtacccaggggccctgggccggcccccacccatgccacccatgaactttgacccccgctggatgatgatccccccctacgtggacccccggctgctgcagggccggccccccctggacttctacccacctggggtgcaccccagcggcctggtgccccgggagaggagtgacagcggcggcagcagcagcgagccctttgacagacatgccccagccatgctgcgggagcggggcaccccacctgtggaccccaagctggcctgggtgggagatgtgttcaccgccaccccagctgagccccggcccctgaccagccccctgcggcaggccgcagatgaagatgacaagggcatgaggtctgagaccccacctgtgcccccacctccaccctacctggccagctacccaggcttcccagaaaatggagcccctggcccccccatcagccgcttccccctggaggagcccggcccccggcccctgccctggcccccaggcagtgatgaggtggccaagatccagaccccaccacccaagaaggagccccccaaggaggagacagcccagctgactggacctgaggccggcaggaagccagcccggggcgtgggcagcggcggccagggccccccaccaccccggcgggagagcaggacagagacccgctggggccccaggcctggcagcagcagaagaggcatccccccagaggagcccggggccccaccccggcgggccggccccatcaagaagcccccaccacccaccaaggtggaggagctgccccccaagcccctggagcagggagatgagacccccaagccacccaagccagaccccctgaagatcaccaagggcaagctgggcggccccaaggagaccccaccaaatggaaacctgagccctgccccccggctgcggcgggactacagctatgaaagagtgggccccaccagctgccggggccggggccgcggggagtactttgcccggggccggggcttccggggcacctatggaggccggggccgcggggctgctggcaacagcgctgtgacagagagctttgaggagatgatgggcgtggaggtgggccagggcgaccagaccaccctgctgctgcctgaggccgccctgcctgcccggcatggagcccgggtgcagagcatgaggaagagccccagcggggccggcagcggggcccagaagcaggccgcccggcccatgagggtcatctggctgctgcagacccggcggctgccccacccccggcgggagcacagccccaggagccgcagccccaccaccaggagccccaccttccctgccccagcccgcttcaccccaggagtgggggagagcagcctgcctgagggcatcagccctggcccccggcggcgggagcccccccaggtgtgccccggctggagccccccagccaagagcctggcccccaagaagccacccaccggccccctgccccccagcaaggagcccctgaaggagaagctgatccctggccccctgagccctgtggcccggggcggcagcaatggaggcagcaatgtgggcatggaggatggagagcggcccaggagaagaagacatggccgggcccagcagcaggacaagcccccacgcttccggcggctgaagcaggagcgggagaatgctgcccggggcagcgagggcaagcccagcctgaccctgcctgccagcgcccctggccctgaggaggccctgaccaccgtgacagtggccccagcccccaggagagctgctgccaagagcccagacctgagcaaccagaacagcgaccaggccaatgaggagtgggagacagccagcgagagcagtgacttcaccagcgagaggagaggagacaaggaggcccctcctcctgtgctgctgacccccaaggctgtgggcaccccaggcggcggcggcggcggcgctgtgcccggcatcagcgccatgagcagaggagacctgagccagagggccaaggacctgagcaagaggagcttcagcagccagaggcctggcatggagcggcagaacagaagacctggccctgggggcaaggccggcagcagcggcagcagcagcggcggcggcggcggcggccctgggggccgcacaggccctggccgcggggacaagaggtcctggcccagccccaagaacagaagcaggcctcctgaggagcggcccccaggcctgcccctgcccccacctccacccagcagcagcgctgtgttccggctggaccaggtgatccacagcaacccagctggcatccagcaggccctggcccagctgagcagccggcagggctctgtgacagcccctgggggccaccccaggcacaagccaggcctgccccaggccccccagggccccagccccaggcctcccaccaggtatgagccccagagggtgaacagcggcctgagcagtgacccccactttgaggagcccggccccatggtgcggggcgtgggcggcaccccccgggacagcgctggggtgagccccttcccccccaagagaagagagaggcctcccaggaagccagagctgctgcaggaggagagcctgcccccaccccacagcagcggcttcctgggcagcaagccagagggccctggcccccaggccgagagccgggacaccggcacagaggccctgaccccccacatctggaaccggctgcacacagccaccagcaggaagagctaccggcccagctccatggagccctggatggagcccctgagcccctttgaagatgtggccggcacagagatgagccagagcgacagcggcgtggacctgagcggggacagccaggtgagcagcggcccctgcagccagaggagcagcccagatggcggcctgaagggagctgctgagggcccccccaagaggcctgggggcagcagccccctgaatgctgtgccctgtgagggccccccaggcagcgagcccccaagaagacctcctccagcccctcatgatggagacaggaaggagctgccccgggagcagcccctgcccccaggccccatcggcacagagaggagccagaggacagaccggggcacagagcccggccccatccggcccagccacaggcctggcccccctgtgcagtttggcaccagtgacaaggacagcgacctgcggctggtggtgggggacagcctgaaggccgagaaggagctgacagcctctgtgacagaggccatccctgtgtcccgggactgggagctgctgcccagcgctgctgccagcgctgagccccagagcaagaacctggacagcggccactgtgtgcctgagcccagcagcagcggccagaggctgtacccagaggtgttctacggcagcgctggccccagcagcagccagatcagcggcggccacggcctgagcatcaccagcaagcagtggaggaggcctggcacccccagcctgcacccctaccgcagccagcccctgtacctgcccccaggccctgccccacccagcgccctgctgagcggcgtggccctgaagggccagttcctggacttcagcaccatgcaggccacagagctgggcaagctgcctgctgggggcgtgctgtacccacctccttccttcctgtacagccctgccttctgccccagccccctgcctgacaccagcctgctgcaggtgcggcaggacctgcccagccccagcgacttctacagcacccccctgcagcccggcggccagagcggcttcctgcccagcggggccccagcccagcagatgctgctgcccatggtggacagccagctgcctgtggtgaactttggcagcctgcccccagcccctcctccagcccccccacccctgagcctgctgcctgtgggccctgccctgcagccccccagcctggccgtgcggcccccaccagccccagccaccagggtgctgcccagccctgcccggcccttccctgccagcctgggccgggcagagctgcaccctgtggagctgaagcccttccaggactaccagaagctgagcagcaacctgggcggccctggcagcagcaggaccccacccaccggccgctccttcagcggcctgaacagccggctgaaggccacccccagcacctacagcggggtcttccgcacccagagggtggacctgtaccagcaggccagccccccagatgccctgcgctggatccccaagccctgggagaggactggacctccaccccgggagggccccagcagaagagctgaggagcccggcagcagaggagacaaggagcccggcctgcccccacccaggtag

SEQ ID NO: 344917 - DNA, 4149 bp, Artificial Sequence
  derived and/or modified sequence
atgctgcgggagcggggcaccccacctgtggaccccaagctggcctgggtgggagatgtgttcaccgccaccccagctgagccccggcccctgaccagccccctgcggcaggccgcagatgaagatgacaagggcatgaggtctgagaccccacctgtgcccccacctccaccctacctggccagctacccaggcttcccagaaaatggagcccctggcccccccatcagccgcttccccctggaggagcccggcccccggcccctgccctggcccccaggcagtgatgaggtggccaagatccagaccccaccacccaagaaggagccccccaaggaggagacagcccagctgactggacctgaggccggcaggaagccagcccggggcgtgggcagcggcggccagggccccccaccaccccggcgggagagcaggacagagacccgctggggccccaggcctggcagcagcagaagaggcatccccccagaggagcccggggccccaccccggcgggccggccccatcaagaagcccccaccacccaccaaggtggaggagctgccccccaagcccctggagcagggagatgagacccccaagccacccaagccagaccccctgaagatcaccaagggcaagctgggcggccccaaggagaccccaccaaatggaaacctgagccctgccccccggctgcggcgggactacagctatgaaagagtgggccccaccagctgccggggccggggccgcggggagtactttgcccggggccggggcttccggggcacctatggaggccggggccgcggggcccggagccgggagttccgcagctaccgggagttcagaggagatgatggccggggcggcggcactggaggccccaaccaccccccagccccccggggccgcacagccagcgagaccaggtctgagggctctgaatatgaggagatccccaagagaagacggcagaggggcagcgagactggaagtgagacccatgaaagtgacctggcccccagcgacaaggaggcccccacccccaaggagggcaccctgacccaggtgcccctggcccctcctcctcctggggccccacccagccctgccccagcccgcttcaccgcccggggcggccgggtcttcaccccccggggcgtgcccagccggcggggccggggcggcggccggcccccaccccaggtgtgccccggctggagccccccagccaagagcctggcccccaagaagccacccaccggccccctgccccccagcaaggagcccctgaaggagaagctgatccctggccccctgagccctgtggcccggggcggcagcaatggaggcagcaatgtgggcatggaggatggagagcggcccaggagaagaagacatggccgggcccagcagcaggacaagcccccacgcttccggcggctgaagcaggagcgggagaatgctgcccggggcagcgagggcaagcccagcctgaccctgcctgccagcgcccctggccctgaggaggccctgaccaccgtgacagtggccccagcccccaggagagctgctgccaagagcccagacctgagcaaccagaacagcgaccaggccaatgaggagtgggagacagccagcgagagcagtgacttcaccagcgagaggagaggagacaaggaggcccctcctcctgtgctgctgacccccaaggctgtgggcaccccaggcggcggcggcggcggcgctgtgcccggcatcagcgccatgagcagaggagacctgagccagagggccaaggacctgagcaagaggagcttcagcagccagaggcctggcatggagcggcagaacagaagacctggccctgggggcaaggccggcagcagcggcagcagcagcggcggcggcggcggcggccctgggggccgcacaggccctggccgcggggacaagaggtcctggcccagccccaagaacagaagcaggcctcctgaggagcggcccccaggcctgcccctgcccccacctccacccagcagcagcgctgtgttccggctggaccaggtgatccacagcaacccagctggcatccagcaggccctggcccagctgagcagccggcagggctctgtgacagcccctgggggccaccccaggcacaagccaggcctgccccaggccccccagggccccagccccaggcctcccaccaggtatgagccccagagggtgaacagcggcctgagcagtgacccccactttgaggagcccggccccatggtgcggggcgtgggcggcaccccccgggacagcgctggggtgagccccttcccccccaagagaagagagaggcctcccaggaagccagagctgctgcaggaggagagcctgcccccaccccacagcagcggcttcctgggcagcaagccagagggccctggcccccaggccgagagccgggacaccggcacagaggccctgaccccccacatctggaaccggctgcacacagccaccagcaggaagagctaccggcccagctccatggagccctggatggagcccctgagcccctttgaagatgtggccggcacagagatgagccagagcgacagcggcgtggacctgagcggggacagccaggtgagcagcggcccctgcagccagaggagcagcccagatggcggcctgaagggagctgctgagggcccccccaagaggcctgggggcagcagccccctgaatgctgtgccctgtgagggccccccaggcagcgagcccccaagaagacctcctccagcccctcatgatggagacaggaaggagctgccccgggagcagcccctgcccccaggccccatcggcacagagaggagccagaggacagaccggggcacagagcccggccccatccggcccagccacaggcctggcccccctgtgcagtttggcaccagtgacaaggacagcgacctgcggctggtggtgggggacagcctgaaggccgagaaggagctgacagcctctgtgacagaggccatccctgtgtcccgggactgggagctgctgcccagcgctgctgccagcgctgagccccagagcaagaacctggacagcggccactgtgtgcctgagcccagcagcagcggccagaggctgtacccagaggtgttctacggcagcgctggccccagcagcagccagatcagcggcggggccatggacagccagctgcaccccaacagcggcggcttccggcccggcacccccagcctgcacccctaccgcagccagcccctgtacctgcccccaggccctgccccacccagcgccctgctgagcggcgtggccctgaagggccagttcctggacttcagcaccatgcaggccacagagctgggcaagctgcctgctgggggcgtgctgtacccacctccttccttcctgtacagccctgccttctgccccagccccctgcctgacaccagcctgctgcaggtgcggcaggacctgcccagccccagcgacttctacagcacccccctgcagcccggcggccagagcggcttcctgcccagcggggccccagcccagcagatgctgctgcccatggtggacagccagctgcctgtggtgaactttggcagcctgcccccagcccctcctccagcccccccacccctgagcctgctgcctgtgggccctgccctgcagccccccagcctggccgtgcggcccccaccagccccagccaccagggtgctgcccagccctgcccggcccttccctgccagcctgggccgggcagagctgcaccctgtggagctgaagcccttccaggactaccagaagctgagcagcaacctgggcggccctggcagcagcaggaccccacccaccggccgctccttcagcggcctgaacagccggctgaaggccacccccagcacctacagcggggtcttccgcacccagagggtggacctgtaccagcaggccagccccccagatgccctgcgctggatccccaagccctgggagaggactggacctccaccccgggagggccccagcagaagagctgaggagcccggcagcagaggagacaaggagcccggcctgcccccacccaggtag

SEQ ID NO: 344918 - DNA, 6474 bp, Artificial Sequence
  derived and/or modified sequence
atgagcgaccggagcggccccaccgccaagggcaaggacggcaagaagtactcaagtctgaacctcttcgacacctacaagggaaaatccctagagatccagaagcccgccgtggcgccaagacatggcctgcagtccctggggaaagtcgctattgcccgccggatgcctccgcctgcgaatttaccctccctgaaagccgaaaataaaggcaatgatcctaacgtgtctctcgttcctaaggacgggactggctgggcgagcaagcaagaacagtccgaccccaagagtagcgacgccagcacagcgcaaccacccgaaagccagcctttacctgccagccagacccccgcctctaatcaacctaagaggccccccgccgcacccgagaatacacctttagtgccttctggcgtcaagtcttgggcccaagcgtctgttacccacggcgctcacggggatgggggcagggctagctccctgctgagtcgcttttcacgagaagagttcccgactctacaggccgcaggagaccaggacaaggccgcgaaggagcgcgagtccgcagagcagagttctggcccagggccaagcctgcgcccacaaaattctacgacatggcgtgacggagggggaagaggcccagacgagctcgagggacctgactccaagctgcatcatgggcatgatccaagaggcggactgcaaccaagtggccctccacagtttcccccctaccgaggaatgatgcctcccttcatgtatccgccatacttgccattcccaccgccatatggcccacaaggaccatataggtacccaacacccgatggacctagcagatttccacgcgtcgcgggtccccgggggtcaggacccccaatgcgcttggtggaacccgtcgggcggccgtctattctgaaagaagacaatctgaaggagtttgatcagctggatcaagagaatgatgacgggtgggccggtgcccatgaggaggttgattacaccgagaagctcaaattttccgatgaggaggacgggcgggactccgacgaggagggcgctgagggccatagagacagccaaagcgcctctggcgaggagcggccaccagaggctgatgggaagaagggtaatagtcccaatagtgaaccccccacccctaagacagcttgggcggaaacctctcggccgcctgaaacagagcccgggccccccgcgcctaaacccccattgccccctccacaccggggcccagctggaaactggggcccgccgggcgattaccctgacagaggcggaccaccttgcaagcccccagcacctgaggacgaggacgaggcttggcggcagcgcaggaagcaaagcagctctgaaattagccttgccgttgagcgcgcgaggaggcggcgggaagaggaagaacgaaggatgcaggaggaacggcgggccgcatgcgctgaaaagctgaaaagactggacgaaaagttcggggcaccagacaagagactcaaagccgagcctgctgcaccccccgcagccccatctaccccagcaccccctcctgccgtccccaaggaacttcccgcgccaccagcaccaccccccgcctccgccccaacccccgaaacagaacccgaggagcctgcccaggccccacccgctcagtccaccccaaccccaggtgtggcggcagctcccaccctcgttagcggcgggggctctacaagttccacatcttccggaagcttcgaggccagcccggtcgagccccaactccccagtaaggagggaccagagccgcccgaagaagtgccccctccaacaactcccccggtgcccaaagtcgaacccaagggagacggaatcggacccacccgccagcctccgtcgcagggcctggggtacccaaagtaccagaaaagtctacctccccggttccagcgccaacaacaggagcagctgctgaaacagcagcagcagcaccagtggcaacaacaccagcagggctcagcccctcccacacctgtccccccctcacccccgcagcctgtcacccttggggccgtcccagcccctcaagcgcctcctcctcccccaaaggcactctatcccggagccctgggaagaccgccacctatgcctccgatgaattttgatcctcgatggatgatgataccaccatacgtggaccctcgtttactccagggccgtccgcccttagatttttacccaccaggagtgcacccatccggtcttgtgccgagagagcggagcgattccggcggatctagctccgagcctttcgatcgacacgccccggcaatgctgcgggaaagaggcacaccacccgtcgacccgaaactcgcctgggtcggagatgtgtttacggctaccccagccgagccacggcccctgacgtcccctctgagacaggcagccgatgaagacgataaggggatgaggagcgagactccaccggtccccccgccccctccttacctggcttcctatcccggtttcccagagaacggcgcgccgggcccccccatctctaggttccctctggaggaaccaggccccaggcccctcccttggcctccaggcagcgatgaggtagccaagattcagactcctcccccgaagaaagagcctccaaaagaggagacagctcaactgactgggcccgaggcggggcgaaagcctgcacggggtgtggggtccggaggtcaggggccccccccaccacggagagaatctcggacagaaacgcgctggggtcctagacccgggtcaagcagacgcggcattccccctgaggaacccggtgccccaccacgccgtgctggcccaatcaagaagccaccaccacctacgaaagtggaggaactaccaccaaagccactggaacagggggacgaaaccccgaagccccccaagcccgatcctctgaaaataacgaaggggaagctgggtgggcctaaagaaacacccccgaacggaaatctctcgcctgcaccaagactgcggcgcgattactcttatgaacgggtaggcccaacaagctgccgcggtcgggggcgcggggagtactttgcgagaggccggggcttcaggggtacctatggcggccgtggccgtggcgcaagatcacgcgagtttcggagctatcgcgaattcagaggagacgacggccgcggcggcggaaccggagggcctaaccacccacctgcgccaagggggagaactgcctccgagacgaggagcgaagggtcggaatacgaagagatccctaagcggaggcgccagcggggcagtgaaactggatccgaaacacacgaaagtgatctggccccttccgacaaggaggctccgacccctaaggagggcaccttgacacaggtaccgttggcgcccccccctcctggcgctccaccgtcccccgcgcccgcccgcttcaccgcacgtggaggccgcgtttttaccccccgaggagtaccctccaggagaggaagggggggcggacgacctcctccccaggtgtgtcctggttggtcccctcccgccaaaagtcttgcgcctaagaaaccacccacaggtccactgcccccatctaaggagccactgaaagaaaaacttatccccggtccccttagcccggttgcccgcggtggatctaacggcgggtccaacgtggggatggaggatggagaacgaccgaggaggcgtagacatggccgtgcccagcagcaagacaaaccaccaaggttcagacgcctgaaacaggagcgagagaacgccgctaggggaagtgaagggaaaccttccttgacactgcctgcctctgcgcccgggcctgaggaggccttgacaaccgtcaccgtggcacctgctccaaggagagcggcagccaagagccctgatttatccaatcaaaattcagaccaagccaatgaggagtgggagaccgcctccgagtccagcgactttacgagcgagcgacgcggggataaagaagcccccccaccagtcttactgacccccaaagcagtcggaacccctgggggggggggtggaggcgcagtgcctggcatttcggctatgagtcgtggtgatctctcccagcgcgctaaggacttgagtaagaggagtttttcatcccagcgacctggaatggagaggcaaaaccgtcgacctggacctggaggaaaggctggttcaagtggatcatcatctggcggaggcgggggcggacctggagggcgaaccggtccgggacggggggacaagagatcttggccgtcgcctaaaaaccggtcgcgtcctcccgaagaacggcctccaggtctcccactgccccctccacctccgtcctcttcggccgtttttaggcttgatcaggtcatccactcgaatcccgccgggattcagcaggccctggcccagctgagcagcaggcagggttctgtgacggctcccggagggcacccaaggcataagcccgggctcccacaggcaccacaagggccatccccaaggccgcctactaggtatgagcctcagcgcgtgaatagcggtttatcctctgacccccatttcgaagagccaggacctatggttcgaggggttggtggcactcctagggactcagctggggtgagcccctttccaccaaagagacgtgagaggccaccacggaaacccgagctattgcaggaggagtctctaccccccccccattccagtgggttccttggctcaaagccagagggccccgggccccaagctgagtcccgggacacaggcaccgaggctctgactccgcacatatggaacagattgcataccgccaccagccgtaaatcttaccgcccgagcagcatggaaccttggatggagccgctctccccctttgaggatgttgccggcaccgaaatgagccagtcggattctggagtggatctctctggagacagtcaggtgagtagcgggccttgctcacagagaagctccccggatggcgggttgaaaggtgccgcagaaggccctcccaagcgccctgggggaagcagtcccctgaatgcggtcccctgtgaaggaccccctggcagcgaacctccgcggaggccgcccccagcgccccacgacggtgatcggaaggagttgcctagagagcagcctcttcccccggggcccattggcaccgagcgatcccagaggaccgaccgaggaactgagccgggtcctatcagaccttctcataggcccggtcctcccgtacaattcggtacatccgacaaagactccgatctgcgactcgtggtgggcgattccctgaaggccgagaaggaactgactgcctccgtgacagaggctataccagtctctcgagattgggaacttctgccctccgctgctgcttccgcagagccacagtccaagaatctggattcaggacactgcgtccccgaaccctcctccagcggccagaggttgtatcccgaggttttttacgggtccgctgggccgtcctcctcccaaatctcgggcggtgccatggactcacagctgcatccaaatagtgggggctttcgccccggcacacctagcttacacccctaccggagccagccattgtatctgccacccggccccgcgcccccctccgcattgctgagcggggtggctctcaaaggccagttcctggatttcagtaccatgcaggccaccgagctcgggaagctgcccgctgggggcgtgctttatccaccaccaagctttctgtacagccccgccttctgcccaagccccttacctgacacctcgctgctgcaggtccgtcaggacctcccatcgccaagcgacttttacagtacacctctgcagcctggcggtcagagcggttttctgcctagcggggctcccgctcagcagatgcttctgccaatggtggatagtcagctgccagtagtgaattttgggtcactccctcctgcacccccgccagcgcccccgccactctcattattgccagtcggcccagcactgcagccaccttcactcgcagtgaggccccctcccgcacccgcaacgcgcgtgctcccatctcccgcccgtccatttcccgcctccctgggacgagcagagcttcatccagtggaacttaagcccttccaggactaccaaaagttgtccagtaatctaggtggaccagggagctctagaacacctccaacgggccgatcatttagcggcctgaactctagactgaaggccaccccaagtacttatagcggcgtatttcgaacccagcgggttgatttataccagcaagcctcacccccagacgcattgagatggatcccgaagccctgggaacggactggtccacccccgcgtgagggtccaagccgacgcgctgaggaacctggaagccgcggagacaaggaacccggtttgcccccccccaggtag

SEQ ID NO: 344919 - DNA, 6474 bp, Artificial Sequence
  derived and/or modified sequence
atgagcgaccggagcggccccaccgccaagggcaaggacggcaagaagtacagctctcttaaccttttcgacacatacaaaggtaagagcctggaaatacagaaacccgcagtcgctccaaggcacggccttcagtccctgggaaaggtcgcaatcgctcggaggatgcctccccctgccaatctgccttccttaaaggccgaaaacaagggaaatgatccaaacgtatctcttgttcctaaggacggcactggttgggcttctaagcaggagcagagcgaccctaagagctcggatgcgtctaccgcacagcctcccgagagccagccactgccagcgtctcagaccccagccagcaaccagccaaaacgccctcctgccgcacctgagaacacccctctggtgccttcaggtgtgaaatcttgggcccaagcatctgtaacacatggggcacatggtgacggcggccgagcatcttcactgctcagcagattttcccgcgaggaatttcctaccctgcaagccgccggggaccaggacaaggcggccaaggagagagagagtgccgagcagtcgtctggtcctggtcctagtctgaggccacagaattctactacttggcgggacgggggggggagagggccagatgaattagagggaccggattccaagctgcaccacggacacgacccacggggaggcctacagcctagcggaccaccacagttcccaccttacaggggaatgatgcctccgttcatgtaccccccttacctcccttttcctccaccatacggaccccagggtccgtaccgctaccccactccagacggcccctcaagatttccaagggtcgcaggcccacgcggcagcgggccccctatgaggttagtggagccggtgggcagaccgagcatcctaaaagaggacaatctcaaagagttcgaccaactcgaccaggagaatgacgacggatgggcaggggcccacgaagaagtggattataccgaaaaactcaaattttcagatgaagaagatggccgagactccgacgaagagggcgcagaggggcatcgggatagccagagtgcatccggtgaggagcgaccaccagaagccgatggtaaaaagggcaactctccaaatagtgagccgcccactcctaagacagcctgggcagaaacgtcccggccaccggaaactgagcccgggcctccagcgcctaagccgcctctgccacccccacaccggggtcccgccggaaactggggccctcccggcgactacccagaccgaggggggcccccgtgtaagcctccagcccccgaggacgaggacgaggcttggcggcagcgccgcaaacaaagtagcagtgaaatatccctggctgtcgagagggcgcgcagacgacgtgaggaagaggaacgtaggatgcaggaagagcgcagggccgcatgcgcagagaaactcaagagactggatgagaagttcggtgcaccagataagcgtctgaaagcggagcccgcagctccccctgcagctccatctaccccagccccaccgcccgccgtcccaaaagaactgcctgcgccccccgctcccccgccagcatctgcccctactccagagaccgagcccgaggagccagcccaggcgccccctgcccaatccacacctactcccggcgtagcggcagcaccaaccctggtgtctggtgggggatccacctcgagcacctcaagcggatccttcgaggcaagtcccgtggagcctcagctcccttccaaagagggaccagagcctcctgaggaggtgccgccacctaccactccacccgtccccaaggttgagcccaagggagatggtattgggcccacaagacaaccaccgagccagggtttgggctaccccaaatatcaaaagtcactgcccccgcgattccagcggcagcagcaggagcaactactgaaacagcagcaacaacaccaatggcagcagcaccagcagggaagcgctccacctacacccgttcctccatcaccaccacagccagtcacattgggcgccgtgccagccccgcaagcccctccacctccaccaaaagctctctatcctggcgcccttgggaggccaccacctatgccgccaatgaattttgacccgcggtggatgatgatccccccgtatgtggacccccgcctgttgcagggccgccccccactggatttttatccccctggcgtgcaccctagcgggttggtgcctcgggagcggtctgacagcggtggaagcagttccgaacccttcgatcgccacgcacctgccatgctccgtgaacggggaacacctccagttgatcctaagctggcctgggtgggtgacgtatttacggcaacaccggctgaaccacggcctcttacatcgcctcttcggcaggctgccgacgaggacgacaaaggaatgcgatccgaaacgccgccagtgccaccaccccctccttacctggctagctacccagggttcccagagaatggagcccccggccctccaatttctcggtttccgttggaggaaccaggtccgaggcctctcccatggcctcccggaagtgacgaagttgccaagatccagacacctccacccaagaaggagccacctaaagaggaaaccgcacagctgaccggccctgaagcaggcaggaaaccggcgcgcggagtcgggagtggcggacaggggccacctcccccgagaagagagtctaggactgaaacacgctggggacccagaccaggttcgtcacgtcgaggaatacccccagaagagcccggggcccccccacgcagggctgggccgatcaagaaacccccgcctccaaccaaggtagaagagcttccgccgaagccactggaacagggagacgagacccccaaacccccgaagcctgatccgctcaagatcaccaagggcaaactgggcgggcctaaagaaactccgcctaacggcaatctctctcccgccccaaggctgcgccgcgattatagctacgaaagggttggccctacatcctgtaggggacgcggccgcggagagtatttcgccaggggaagaggctttagagggacttacggcggaaggggtagaggggcgaggagccgtgaatttagaagctacagagaatttcgcggtgacgacggacgtggaggcggcacgggcggaccgaatcatccccccgctccaaggggccggactgcgagtgagacccggagtgagggctctgagtatgaggagattcctaagagacgcaggcagagaggctctgagacgggctccgagacgcacgagtccgacctcgcccctagtgataaggaggcccccacaccgaaggaaggaaccctgacacaggtaccacttgcccctcctccaccaggggcccctccatctcccgccccagctaggttcactgcaagagggggacgcgtattcacgccacggggggtgccctccaggcgcggacggggcggaggtcggccccccccacaggtctgccccggatggagcccaccggctaagagcttggccccaaagaagcctccaactgggcctctgccccctagtaaggagcctctcaaggagaagttgattccagggcctttaagtcccgtagctagaggggggagcaatggtgggtccaacgtagggatggaggacggcgagcggccccgccggagacgacatgggagagcgcagcagcaggacaagcccccgaggttccgtagattaaaacaggaacgcgagaatgctgcccgtggtagcgagggaaagcccagcctaaccttgccggcctcagcgccgggtcctgaagaggccctgaccacagtgaccgtcgctccagcacccagaagagccgccgcaaagtcccctgatcttagtaaccagaacagcgaccaggccaatgaggaatgggagacggcgtctgaaagttcagattttactagtgaacgccggggcgataaagaggcaccgcctcctgttcttctcactccaaaggccgttggaacacctggtgggggcggaggcggggcagtgcctggcattagtgcgatgagtcgcggagacctttcccagagagccaaggacctctccaagagatcattttcctcccagaggcccgggatggaacgccaaaatcggcggcccgggcccggagggaaagccggttcatccgggtcaagctccgggggcgggggcggtggacctggcgggcgcactggtcccgggcgtggggataagcggagttggccctctcccaaaaacaggagtagacctcctgaagagaggccccctggacttcctctcccccctccccctccttctagcagcgccgtatttcgattggaccaggtgatacactcgaaccctgccgggattcagcaggccctcgcccagctgtcaagtcggcaggggtctgttaccgccccggggggccatcccagacacaaacccggcctgccccaggcaccccagggcccttctccacgcccccccacaagatatgagccccaaagggtcaattcaggtctcagctctgacccccacttcgaagagcccgggccaatggtacgcggggtcggaggcacgccccgcgactcagccggggtgtcgcctttcccacccaaacgccgtgaaaggcctcctcgaaagcccgaactgctgcaggaagaaagcctgcccccccctcatagtagtggattcttgggctccaaacccgaagggccaggccctcaggcagagagcagggacaccggaaccgaggcgctgacaccacacatctggaaccgtctgcatacggcgacaagcaggaaatcttatcggccctcctcgatggagccgtggatggagccactgtctcccttcgaggatgtggctggcaccgagatgtcccagagcgactcgggggtggatctctctggggactctcaagtgtcatccggtccgtgcagccaacgtagttctcccgacggcggattgaagggagcagccgagggcccacctaaacggccagggggatcctcccctctcaacgcagtcccctgcgagggacccccgggtagcgaacctcctagacgcccaccacccgctccgcacgatggagataggaaggagctgcctcgagagcagcctctcccccccgggcccatcggtacagaaaggagtcagagaaccgatcgcggaactgagccgggccctatcaggccgtctcatcgccccggtccacccgtgcaattcggaacaagcgataaggactctgatctgcgtctggtggtgggagatagcttaaaggcagaaaaggagctgactgccagcgtgactgaggccatacccgtgtctcgagattgggaactgttaccctctgcagccgcctccgctgaaccgcagagtaagaatttggatagtgggcactgtgtgccagagccctcctcttccggacagcgtttgtatcccgaggtcttttacgggagtgccgggccgtcttcgagccaaatcagcggcggagccatggacagtcagctacatccaaacagcggcgggttccggcctggcacgccgtctctgcatccctatcgttctcagcccctgtacctgccacctggcccagcccccccatccgccctgctcagtggcgttgctctcaagggccagtttctcgacttttcgacaatgcaggctactgagctcggaaagctgccggccgggggagtgttatacccgcccccaagctttctgtactcgcccgccttttgtccttcccccctgccggacacctctctgctgcaggttcggcaggatctgccgtcacccagcgatttttatagcacaccattgcagcctggcggacaatcaggtttcctgcccagcggggccccagctcaacagatgctactgcccatggtggactctcaactgccagtggtgaattttgggtcactgccacctgccccccctcctgctcctcctcccctgtctttactcccggtaggcccagccctgcaaccaccgagcctcgcagttagaccgcccccagctcccgccacaagagtgctgccgtctcctgcaaggccctttcctgccagcctcggccgagcggagttacatcctgtggaacttaaaccattccaagattatcagaaattatcgtccaaccttggtgggcctggctcaagccgtacccctccaacaggccggagcttctctggcttaaacagccgccttaaagcaaccccctccacttatagtggagtgtttagaacacagcgagtcgatctgtatcagcaggccagtcctccagatgcgctgaggtggatcccaaaaccatgggaacggaccggaccccctcccagagaggggcctagccgccgtgccgaggaaccgggcagccggggcgataaagaacccggtctgcctccacctcggtag

SEQ ID NO: 344920 - DNA, 6450 bp, Artificial Sequence
  derived and/or modified sequence
atgagcgaccggagcggccccaccgccaagggcaaggacggcaagaaatactcttctctgaatctgttcgacacatacaagggtaaaagcctggagatccagaagcctgctgtggccccccgtcacggactgcagtccttgggcaaggtggctatcgctcgtcgaatgcctccaccggcaaatctgcccagtttaaaggcagagaataaagggaacgaccccaacgtttccctggtgcccaaagatggaaccggatgggcatccaagcaagagcagtctgaccccaagtcttcagatgctagtacggcccagcccccggagagtcagcctctgcctgcctcccagacccccgcttccaatcagcccaagcgccctcctgccgctccagagaataccccactcgtcccgagtggagttaaatcatgggcacaggcgagcgtgacacacggagcccacggggatggaggacgggccagttccctgcttagccgattttcccgagaggagttcccaacacttcaggccgctggagatcaggataaagcagctaaggagagggagtcagcagaacaaagcagcgggccagggccatcgctcagaccgcagaatagtactacctggcgggacggtggagggcgcgggccggatgagttagagggtcccgactcaaagttacaccatggacatgaccctcggggggggctacaaccttctggacctcctcagtttcccccgtatcgggggatgatgcctccttttatgtacccgccctacttgccttttccaccgccatacggaccccaaggaccctatcgatacccaactcccgacggccccagccgcttcccccgtgtcgccggcccacgggggtccgggccacctatgcgcctggtggaacccgtgggccgcccttccattctgaaggaggataatctgaaggagttcgaccagctggatcaggagaatgacgatggttgggctggcgcccacgaagaagtggactatacggaaaaattgaaattctcagacgaggaagacgggcgagattctgatgaagagggtgctgaagggcaccgggactctcaatcggcgagtggggaggagcggccacctgaggctgacggcaagaaaggcaatagccccaactctgagcctcccactcctaagacagcttgggctgaaacttccagaccaccggagaccgagcccggtccgcctgcccctaaaccccctctgccacctcctcacagaggtcccgccgggaactggggaccccccggtgattaccctgacagaggaggaccaccatgtaagccccctgcccctgaagatgaagacgaggcctggcggcagcgtcggaagcagtccagctcagagatatctctagccgtcgagcgggcacggcgcaggagggaagaggaagagcgcaggatgcaagaggagagacgcgctgcctgcgcagaaaaactaaaacgtctggacgaaaagttcggagctccagataaaaggttgaaagccgagcccgccgcccctccggccgccccatcgacgcctgctcctccccctgccgtgcctaaggaactgcccgctccccctgcacccccgccagcaagcgctcctactcccgagactgagcccgaggagccggctcaggctcctccagcacagagtactcctactcctggtgttgctgccgcaccaactctcgtgtctggcggcgggtccactagtagcacctcctccggttctttcgaagcttcacctgttgagccacagcttccatctaaagaaggcccagaaccacctgaggaagtacccccacccacaacacctcctgttccaaaggtggagcccaaaggcgacgggatcgggcctacccggcaaccaccatctcagggcttgggttatccgaagtaccagaagagcctgcccccccgcttccagcgtcaacagcaggaacagcttctgaagcagcagcagcagcaccagtggcagcagcatcagcagggctcggctccccccactcctgtccccccctcccctccccagcctgtaaccttgggcgctgtgccagccccacaggcccccccaccccccccaaaagctttgtacccaggggcgctgggcaggccacctcccatgccaccgatgaatttcgatccaaggtggatgatgatccccccttacgttgaccccagactgctgcagggcaggccacctctggatttctatcctcccggcgttcacccttcgggattggtgccccgtgaacgcagtgatagtgggggttctagcagcgagccgttcgacagacacgccccagctatgttgagagaacgcggcactccccctgtggaccccaagttagcatgggtgggagacgtctttactgcgacacctgctgagccccggccactgacttctccacttcgacaagcagccgacgaggacgacaagggtatgcggtcagagacccccccagtcccaccgccacctccttatctcgccagttacccagggtttcctgaaaacggtgctcctgggccaccgatatccagattccctctcgaggaaccgggccctcgccccctcccctggcctcccggtagcgatgaggttgctaaaattcaaacaccaccgccaaagaaggaacctccgaaggaagaaacggcccaactgacgggccccgaggccggacggaagcccgcacgcggtgtggggtctggtgggcaggggccacctccacctagaagagaatccagaacagaaaccagatggggacctcgtcccggatcttctagacgaggaattccacccgaggaaccaggggctccgcctaggcgagctgggccaattaagaagccgcctccgcccactaaggttgaggaattacctcccaagcctttagaacagggcgatgaaacacctaagccaccgaagcctgaccctctgaaaatcaccaagggaaagctgggcggcccaaaagaaacccccccgaacggtaatctttctccagcgcctcgattgaggcgggattattcctacgaacgggtgggtccaactagttgtcgcggtcggggccgcggtgaatatttcgcccgaggacgtggatttcgcggcacatacggtggccggggtaggggcgcggcaggtaattcagctgtcactgagtcattcgaagaaatgatgggcgttgaagtggggcagggggaccagactaccttacttttgcccgaggcagcactgcccgctagacacggtgctcgggtccagagcatgcgaaagtccccctcaggtgcaggcagtggggctcagaagcaggccgcccgccctatgagagtaatctggttgctgcaaacaagaagattaccccaccctaggcgcgagcactccccccgatctaggagcccaaccacaaggagcccaacatttccagctcctgcacgatttaccccaggtgtgggcgagagctcactgcccgaggggatctcccccggcccccgccgcagggagcccccccaggtctgccccgggtggtcgcctccggcaaagagcctcgctcctaaaaagccacctacaggtccactcccgcccagcaaagaaccactgaaggagaaactgattcccgggcccctatcccccgtcgcacggggtggctccaatgggggcagcaacgtgggaatggaggatggggagcgtccaaggcgtcgcaggcacggaagagctcagcagcaggataaacctcctcgcttccgtcggctaaagcaggagcgcgaaaatgcagctcgaggctccgaaggcaaaccctctctgacgttaccagccagcgctccgggaccagaggaggcccttactaccgtcacggttgctcccgccccaaggcgcgcagccgcaaagtccccggatttgtccaaccaaaacagcgatcaagccaatgaggaatgggagacggctagcgagagcagtgacttcacctcagaacgacgcggagataaagaggccccccccccagttctgctcaccccaaaggctgtcggaacacccggtggaggcgggggcggagccgttccaggcattagcgcaatgtctagaggcgatttgtcccagcgcgctaaggatctatccaagcgcagcttcagcagccagagacctggaatggaaagacagaacaggcgacccggcccaggcgggaaggcaggttcctcgggtagtagcagcggagggggtggtggcggacctggtggcaggacaggcccgggacggggcgacaagcgctcctggccgtcgcccaaaaataggtcccggcctcccgaggaaagacctcctgggctaccattgccccccccgcctccttcttcctccgcagtctttagactggatcaggtgattcactcaaaccctgcagggattcaacaggctctggcccagctgtcttctaggcagggttcggtcaccgcacccgggggtcacccaaggcataagcctggactgccccaagctccacaggggccgtctcctcgcccccccacaagatacgagccacagagggtcaatagcggacttagcagcgatccgcatttcgaggagcctgggccgatggtaagaggggttgggggaaccccacgggattccgccggcgtgagcccatttccaccgaaacggcgagaacggcctccccgtaagccagagctgctgcaggaggaaagtctcccgccgccccacagttctgggttcctcggcagcaagccagaaggacccggacctcaggctgaatcccgggatacgggcaccgaagcacttacgcctcacatctggaaccggcttcacacggccaccagtcggaagagctatagaccatcatctatggagccttggatggaacctctgagcccttttgaggacgttgctgggacagagatgtctcagtccgatagcggtgtggacctatccggtgattcgcaagtgtcctcaggcccttgctcacagaggtcttccccagacggagggctcaaaggagcggcagaaggcccaccaaaacgtccgggcggatcaagcccgctcaatgctgtgccatgtgaaggaccccctggctccgaacctccacggagaccgccccccgccccccacgacggggataggaaagaacttccccgtgagcagcctcttccacctggtccgattggaacagaacgctctcagcggacagaccgaggtactgaacctggtcctattcgaccatcgcatagacccggacccccagtacagttcgggacctcagacaaggacagcgacttaaggctggttgttggtgatagcctgaaggccgagaaggaattgaccgcttcggtaaccgaagccattcccgttagtagggactgggagcttctgccttcagctgccgcctctgcggagcctcagtcaaaaaatctagatagcggacattgtgtgcccgagccaagctccagcggacagaggctctaccctgaggtgttctacggcagcgccggcccgtccagtagccaaatctcggggggacacggcctgtcaatcactagtaagcaatggcgcagaccgggaaccccctctttacacccctaccgctctcagcccctttatttacctcctggtcccgcaccccccagcgcactactgtccggcgttgctttgaagggacagttcctggattttagcaccatgcaggccaccgagctgggaaaactgcccgctgggggtgttctgtaccctcccccaagcttcctgtattctccagcattctgtccatcacctctccctgatacatcactacttcaggtgagacaagacctcccaagcccttcagatttctatagtacaccgttgcagccaggtggacaatcaggctttcttccctccggtgcacccgcccagcaaatgctgctgcctatggtcgatagccagttgccggtcgtaaatttcggctctctgccaccagcaccacccccagcacctccacctttatcactgctccccgtcggtccagcactgcaacccccctctctcgcagtgcgacccccaccagctcccgcaaccagagtgctaccctctcctgctagaccctttcctgcaagcttggggagggctgaattgcatcccgtcgaactaaagcctttccaggattatcaaaaactatcgtcaaacttaggaggccccggaagttccaggactccgcccacaggtaggtctttttccgggctgaattcaaggctcaaagccaccccatccacctactccggggtgttccgcacgcagagggtcgatctgtatcagcaggcgtcaccacccgatgcgctcagatggattcccaaaccttgggagcgcaccggaccacctcccagggagggtccctccaggagagccgaggaacccggcagtcgcggcgataaggagccagggctgccaccacctcgttag

SEQ ID NO: 344921 - DNA, 6417 bp, Artificial Sequence
  derived and/or modified sequence
atgagcgaccggagcggccccaccgccaagggcaaggacggcaagaaatattcttcattaaacctgttcgacacctacaaggggaaaagccttgagatccagaaaccagccgttgctccaaggcacggacttcaatcactgggcaaggttgctattgcgaggcgcatgcccccacctgctaacctgcccagccttaaagcggagaataagggcaatgacccaaacgtgagcttagtccctaaggacggtaccggatgggcttctaaacaagaacagagcgatcctaagtctagcgacgcctccactgcgcaaccaccggagtcacagccactgcccgcgtcccaaacacccgcctcaaaccaacccaaaaggccaccagcagccccagaaaataccccactggtgcccagtggggtgaagtcgtgggcccaagcaagcgtgacacatggcgcacatggggatggcgggagggccagttctcttttgtccaggttttcacgagaagaatttccaactctccaggccgcaggtgaccaggacaaagccgccaaagagcgtgaaagcgcagagcaatcgagtggaccagggccctccctacgtccacagaactccaccacatggagagacggcggcgggagaggccccgatgagttggaaggacccgacagcaaacttcaccatggtcacgacccgagggggggcttgcagccctccgggccgccacagtttccgccctatcggggcatgatgcctccttttatgtacccgccttatctgccattcccaccaccgtacggaccccagggaccataccgatatcctactcccgacggcccaagccggtttcccagggtagctgggcctcgtgggtccgggcccccaatgagactcgttgaaccagttggccggccaagcattctaaaagaggacaaccttaaggaatttgaccagttagaccaagagaatgacgatggctgggccggtgctcatgaggaggttgattacacggagaagttgaagttctcggacgaggaggatgggcgggactcagacgaagagggggccgaaggacatagagactcgcagtctgcctccggcgaagaacggccaccagaggcagacggaaagaaaggaaactcacctaactctgagcctccaaccccaaagacagcctgggctgagacatcaaggccccccgagactgagccggggcctcccgcccctaagccaccattaccaccccctggcgactatcccgacagaggcggacccccctgcaagcctccggccccggaggacgaggacgaggcttggcgacagcggaggaagcagagcagctcggagatctctttggctgtagagagagcccggaggagaagagaagaggaagaacgacggatgcaggaagagaggcgcgctgcttgtgctgagaagctgaagcgattggatgaaaaatttggcgcacccgataaaagattgaaagctgagcccgctgctccccctgcagcaccttccacccccgcccccccgcccgccgtgcccaaggaacttccagcccccccagctcctccaccagcctccgcaccaacgcctgagactgagcccgaggagccagcccaggccccaccggcgcagtccacgccaacacccggagtcgcagccgctcccacccttgttagcgggggcggttcgacaagttctacgagtagtggctcctttgaggcgagccctgttgaaccccagttaccgagcaaggagggacccgagccaccagaagaggtacccccacctacaacacctcctgtcccaaaagtggagcctaagggcgacggcatcggacccacaaggcagcccccttctcagggcttggggtaccctaaatatcagaagtctctgcctcccagatttcagcgtcagcagcaggaacagctccttaaacaacagcaacagcatcagtggcagcaacatcagcagggttcagctcccccgactcccgtgcctcccagtcctcctcagcccgtcacactgggtgccgtacccgcaccccaggccccacccccccctccgaaagccctataccccggcgcgctggggagacctccaccgatgccaccgatgaatttcgatccccggtggatgatgatccctccctacgtggaccctcggctgctgcaggggcggccacccctcgatttctatccacctggggtgcacccatccggtctagtgccccgtgaaagaagtgacagtggagggtctagcagtgaaccctttgatcgccacgctcccgctatgctccgcgaacgcgggactccgcctgttgatcctaaattagcttgggtgggagatgtgtttaccgccacccccgcagagcccagacctctcacctcccctcttagacaagcggccgacgaagacgacaagggcatgagatcagagacgcctccggtgcctcctccgcccccatatctggcctcgtatcccgggtttcccgagaacggcgcccccggtccgccaatatcccggtttcctctggaggagcctgggccacgccctctcccgtggccacccggtagtgatgaggtcgccaagatccagacacctcctcctaagaaggaaccacccaaagaggaaactgcccagcttacaggcccggaggccgggaggaaaccggcgcggggggtgggttctgggggccaagggccccctcccccaagacgggagtccagaacagagactaggtggggtccaaggcctggatcaagcagacggggaatccctccggaagaacctggagccccaccaagaagagccgggccgatcaaaaaaccaccgcctccaacaaaggtggaagaattacctcccaaaccactggaacagggcgacgagactcccaagccaccgaaacccgaccccctgaaaattaccaaaggaaagctaggcggccccaaagaaactccccctaacgggaacctcagccctgctccccggttgagacgcgattacagctacgagcgcgtgggcccaacttcctgtcgggggcgcggcaggggagaatacttcgccagaggacgcgggttccgcggtacctatgggggacggggccgcggggccgcagggaacagcgctgtgacagagtcgtttgaagagatgatgggggttgaggtcggacaaggcgatcagacaacactactactgcctgaagcggcattacccgcccggcatggcgcacgggttcagtctatgagaaagagcccctctggggctggaagcggggcccagaaacaggcagctcgacccatgcgcgtcatttggctgctccagacccgccgactgccacaccctaggcgggagcattcaccccgcagccggtctccaacaactagaagcccgacttttcccgcgcccgccaggttcacaccgggcgtgggcgaatcttctctcccggagggtattagtcccggaccaagacgacgtgaaccaccacaggtgtgcccaggttggagccccccagccaaaagccttgcccccaaaaaacctcccaccgggccccttccccctagcaaggaaccccttaaagagaaattgatccctggaccccttagcccagttgcccggggcggatcaaacggcggatctaacgttggaatggaggacggtgaaagacccaggcggagaaggcatggacgggctcagcagcaggataagccacctcgcttccggaggctgaaacaggagagggagaacgcggcccgcggctctgaaggcaagcccagcctgaccctgcccgccagtgcaccaggtccggaagaggctctcaccaccgtgacagttgctccagcgccaaggagagccgctgccaagtccccggatctgagcaaccaaaatagcgaccaggccaatgaggaatgggaaacagcatctgagagctcagattttacgtccgagcgtcggggggacaaagaagcccccccgcctgtgctcctgacaccgaaagctgtgggcactcctggaggagggggaggcggcgccgtccccgggatctcagctatgtcccggggtgacctgagccagcgcgccaaagacctgagcaaacggtcgtttagctcccaacggcccggtatggagaggcagaaccggcggcctggaccaggtggaaaggcaggcagcagtggttccagcagtggtggggggggtggtggccccgggggacggaccggcccgggaagaggggacaagaggtcttggccgtccccgaagaatcgctcaagaccgcctgaagaaaggccgccaggattaccactccctcctcctcccccctcatcgtctgctgtgtttcgccttgatcaggtgatccactccaaccccgccggcatacagcaggccctcgctcagctgtcttcacggcagggctccgtgaccgcgccaggagggcaccctcgccacaaacccggtttaccccaagcgccgcagggcccatctcctcgacctccgacccgctatgaaccgcagcgcgtgaattcgggccttagcagcgaccctcactttgaagagcccggtcctatggtgcgtggtgtcggaggtacaccacgagattcagctggagtgtccccttttccgccgaaacggcgggagcgtccgcctcgtaaacccgaactcctgcaggaggagtctctcccgcccccgcactcatctgggtttcttgggtcaaagcccgagggaccagggccccaggcggagagtcgtgacacggggactgaggcgctgacccctcatatatggaaccggcttcacaccgctactagccgcaaatcctatcgaccatcttcaatggaaccctggatggaacctctctccccctttgaagatgtggcgggaaccgaaatgtctcagtccgactctggcgtcgatctgtcgggagatagccaggtgtccagcggcccttgcagccagcgatccagccctgatggaggcctcaagggcgctgccgagggaccacccaagcggcctgggggaagtagtcctctgaatgccgtgccctgtgaggggcctccgggctccgagcctccccgcaggcctccacccgctccacacgacggagaccgtaaggagctgcctcgggaacaaccgctgccccctgggccaattgggacagagaggtcccagcgcacggacagaggtaccgaaccaggccccattagaccaagccaccgccccggcccaccggttcagttcgggacttctgacaaggattctgatttgagactcgtggtcggggattccctgaaggccgagaaggagctgaccgcctccgtgaccgaggccatccctgttagccgagactgggagctgctgccctcggccgctgcttcggctgaaccccagagcaaaaacctggattcaggccattgcgtgccagaacctagctccagcggtcagcggctgtaccctgaagtgttctatgggagcgcggggccttcaagcagccagatcagcggtggtcatggactctctattacctctaaacagtggcgtcgacctgggaccccatctctgcatccgtatcggtcccagccattgtacctgccccccgggcctgcacccccttctgctctgctcagtggtgtggcgctgaagggccagtttctggatttctcaaccatgcaagccacagagttgggaaaactgcccgccggcggggtgttatacccccccccatcttttctttatagcccagcgttctgtccttcccccttgcctgatacttcactcctgcaggtgaggcaggacttaccaagtccatccgatttttacagtaccccattgcagcctggtggccagtccggatttctccctagcggcgcaccggcacagcaaatgcttcttcccatggtagatagccagctgccagtcgtgaactttggttcactgccccccgctccaccacccgcccctcctcccctgtccctgctcccggtcggacccgcattacagccccccagcttagccgtccggccacctcccgcccccgcgacacgagtccttcccagccccgcacggccattcccggcctcactggggagagctgagctccaccctgttgaactcaaacccttccaagattatcagaaactgagttcgaatttaggcgggcccggttcgtcccgaacgccccccaccggtcggagcttttctggattaaactccaggcttaaggccacaccaagcacctattccggggtattccggacccagcgagtggatctgtaccagcaagcctcaccgcctgacgcccttcgctggattccaaagccatgggaaagaacagggccgcccccacgagaaggcccatctcgccgggcggaggaaccggggagcagaggagacaaggagcctggccttccacctccaagatag

SEQ ID NO: 344922 - DNA, 4149 bp, Artificial Sequence
  derived and/or modified sequence
atgctgcgggagcggggcaccccccccgtggaccccaagctggcctgggttggtgatgtgtttaccgcaaccccagccgagccacgccctctgacgtctccattgcggcaggcagcagatgaagatgataaaggtatgcgcagcgaaacacccccggtgcctccaccacccccttaccttgcctcttaccccgggttccccgagaacggggctccaggtccccctatcagccgctttccccttgaagagcccggaccacggccgttgccctggcccccagggagtgacgaagtggcaaagatacaaaccccaccccctaagaaggagcctccaaaagaagagaccgcacagctgacagggcccgaggccggacgtaagccagcacgcggcgtgggctcaggcggccagggaccccctccaccaaggcgtgagagtcggaccgagacccgatggggtcctagacctggctcctctcgcaggggcatcccgccagaagagccaggggcaccccccagaagagcgggaccgataaagaagcccccccctcctacaaaagtggaggagctgcctccaaagcccctggagcaaggagacgaaacgccaaaaccaccgaaacctgacccccttaagattaccaagggtaagctcggtgggccaaaggagacgccacccaacggcaaccttagcccggctccacgactccggcgcgattattcctatgagcgcgtgggccctacctcttgtagggggcggggaagaggcgagtattttgccaggggaagggggttcaggggaacttatggtggacggggccgcggcgcgcgctcccgcgaattccggtcgtatcgcgaatttaggggagatgacggacgggggggcggcacggggggacccaatcatccacccgcgcctcgaggccggactgcctctgagactcgaagtgagggctccgaatatgaggagatccccaaacggaggaggcagcggggctccgagacagggtccgagactcacgaatctgacctggccccttcagataaggaagctccaacgcccaaggaggggactttgacccaggtaccactcgctccaccacccccaggcgccccacccagccctgcaccagcaaggtttacagctagaggcggaagggtattcaccccacgaggggtcccatctaggcggggcagggggggcggccgcccccccccacaggtgtgcccagggtggagcccgccagccaaatctctagcccctaaaaaaccaccaactggacctctacccccgagcaaagagcctctcaaggaaaagctcatcccaggccccttaagccctgtggccagaggtggaagcaatggtggatctaatgtggggatggaggatggcgagcgcccccgaagaagacgccacggccgagcacagcagcaagataagccccccagattcagacgcctgaaacaggagcgcgagaatgcagcacggggctcggagggaaagcctagcctgactctcccggcttcagcgcccggccccgaggaagcactgaccaccgtcacagtggcccccgccccgaggagggccgccgctaagtcccccgatctgtcaaatcagaacagcgatcaggcaaatgaggaatgggaaaccgccagcgagtctagcgactttactagcgagagacgtggggacaaggaagccccgcctcctgttctgctaacacctaaggccgtcggcactccgggtggtgggggcggcggagctgtccctggcattagcgccatgtctaggggcgacttgtcacagagggctaaagatctgtccaaacggtcgttttctagccagcgacctgggatggaaagacagaaccgtcgccccgggcccggtggcaaagctggtagcagcgggtcaagttcaggaggagggggaggcgggcctggcggtaggacagggccagggcgaggtgacaaacgtagctggccaagtcccaaaaacaggtcccggccccccgaagagcgtccacctggactgcctcttccccctccacccccctcatcgagcgccgtttttcggctagaccaggtgattcacagcaatcctgcaggcatccagcaggccctggctcagctttcgagccgccaaggatctgtgaccgctccaggtggccaccctagacacaaaccaggccttcctcaggctccgcaggggccaagccctcgacctccaacgagatatgagcctcagcgcgtcaattctggcctgtctagtgatcctcacttcgaagaacctggtccgatggtgcggggggtcggcgggacaccgcgcgactccgccggagtctccccattcccccccaagaggcgagaacggccaccacggaaacctgagttgctccaagaggagtctctgccccctccccactccagtggattcctgggcagtaaaccagaaggacctggcccacaagcagagtctcgtgatactggcacagaagctttaactcctcacatatggaaccggctccacaccgctaccagtcgcaaaagctacagaccctcctctatggaaccttggatggagcccctatccccattcgaggacgttgctggcaccgagatgtcgcagtctgacagtggagtggatttaagcggggactctcaggtttcttctgggccttgtagccagcgctcaagtcctgacggaggattgaagggggctgctgagggtccacccaagaggccgggaggatctagccccctgaacgctgttccctgcgagggcccgcccgggagcgaaccacctcgtcggccccctccggcaccccacgatggggacaggaaagagctcccaagagagcagcccctgcctcccggcccaatcggaacggagaggtcacagaggactgacaggggcacagaaccaggcccaatcaggcctagtcacaggccgggtccaccggtgcagtttgggacctccgataaggactccgacctgcggctcgttgtgggcgatagtttgaaggctgaaaaggaactgactgcctccgtaacagaagctatccccgtcagtcgcgactgggaactgttgccatccgctgcagctagcgccgagccacagtctaaaaatttggattctggccactgcgtaccagaaccatccagttctggccagaggctctaccccgaagtgttttacggctcggcaggaccctcttcttctcagatctcagggggcgccatggactctcagctgcatcctaatagcggcgggtttaggccgggcacaccaagcctccacccatacagatcacagcctctctacctgcccccgggtcctgccccgccctcagctctgctgagtggggttgcgctgaaaggccagttcctagattttagcaccatgcaggcaacggaactgggcaaattgcctgcaggtggcgtactgtacccaccaccctcattcctctactcgcccgcattctgcccatctccactgcccgatactagccttttgcaggtgcgacaggacttgccctcaccgagcgacttctacagcacacctctacagccaggaggccaaagcggattcctgccgtcaggtgcacctgcacagcagatgctgcttccaatggttgatagtcagctcccagtggtgaactttggcagtctaccccctgcacctcctccagcaccgccgcctttgtcattactccctgtgggcccagctctccagcccccatctcttgccgtgaggccccctcctgccccagcgacccgagttcttccgtctccggccagacccttcccggccagtctcggcagggctgagctccatcctgtggagttgaaaccattccaggattatcagaaactctcatctaatctcggtggtcctgggagctctaggaccccgcccacagggcggtctttcagcggccttaacagcagactcaaagccactccttcaacctattccggtgtcttccgtacccagcgagttgacctgtaccagcaagcctcaccacctgacgcccttcggtggattcctaagccatgggaaagaactggcccccctcctagagaggggccaagtagaagggccgaggaaccagggagcaggggtgacaaagagcctggcctccctccccctagatag

SEQ ID NO: 344923 - DNA, 6473 bp, Artificial Sequence
  derived and/or modified sequence
atgtctgacaggtccggccctacagccaagggaaaggatggcaagaagtactccagcctgaatttgttcgacacatacaaaggtaagtccttggagatccaaaagcctgctgttgcccctagacacggattacagtctctgggaaaggtggccatcgcacgcagaatgccccctccagctaatttaccatcattgaaggcagagaataaagggaatgatcccaacgtgtctctcgtgcccaaagacggtactggctgggcctccaagcaggagcagagcgatccgaaatcatctgacgccagcactgcacagccaccagagtctcagcctcttcccgcttctcagacccctgcctctaaccagcctaaaagacctcccgcagctcccgaaaataccccccttgtaccctccggcgtgaaaagctgggctcaggcatccgtgacccacggcgcacatggggacggaggtagagcctcttcacttctttcccgctttagcagggaagaatttcccactttgcaggccgctggggaccaggacaaagccgctaaggaaagagaatccgcggagcaaagttctgggcctggcccatccctgcggccacagaattctactacttggagggacggcggtggcaggggcccagacgaacttgaaggtcccgattctaagctgcaccacggacacgatccgaggggcggtctgcagcctagcggacctccccagttccctccataccggggaatgatgcccccatttatgtacccaccatacctgccattccctcccccatacgggcctcaggggccttaccgataccccacgcccgacggcccttcacggtttccccgtgttgcaggccctcggggatccggtcccccaatgcgattagtggagcccgttgggaggccctcgatactcaaagaggataacctgaaagagttcgatcaactggatcaggagaacgacgatggttgggccggagcacacgaggaggtggactacacagaaaagctgaagttctccgatgaggaggacggtcgggatagcgatgaagaaggggcagagggccacagggatagtcagagtgcgagtggcgaagagcgccctcctgaggccgatggcaagaagggcaacagccccaattctgagccgcctactccgaaaacagcgtgggccgaaacaagccgccctcccgaaaccgaacctggacccccagcacctaagccccctctgcccccaccccataggggccctgccggaaattggggacccccaggagactaccccgataggggcggacctccctgtaaacctcctgcacccgaggacgaagacgaggcctggagacagaggcgtaaacagtccagctcagaaatcagcctcgcagttgaacgcgcaaggcgacgccgtgaagaagaggaacgtaggatgcaggaggaacgcagggccgcatgcgctgaaaagctgaaacgactggatgagaagtttggagcaccagataaaaggttaaaagcagaacccgcagcccctcccgctgcacccagcactcccgcacccccacccgctgtgcctaaggagctgcctgcacccccagccccaccaccagcttccgccccaacacctgaaaccgagcccgaggagcccgcacaggcccctcctgcccaatcaactcctacccctggggtagctgcagcacctacactagtctccggcggaggttccacctcttcaactagcagcggctcgttcgaggctagtcccgtggaaccacagctgccctcaaaggagggcccagaacccccagaagaagttccaccacccaccaccccaccagtcccgaaggttgaacctaaaggcgacggaatcgggccaactcgccagccaccgagtcagggcttaggttaccctaagtatcaaaagagcctgccccctcgatttcaaaggcagcagcaggagcagctactgaagcagcagcagcagcaccaatggcagcagcatcagcaggggagcgccccacccacacccgtgccaccaagccctcctcagcccgtgacactgggcgcagtgcccgctcctcaggcccctccgccaccaccaaaggctttgtatcccggagctctgggaaggcctccccctatgccgcctatgaacttcgacccgcgatggatgatgattcccccatatgtggaccctaggctgttacagggaagaccaccattggatttctacccaccaggtgttcaccccagtgggctcgtcccgagagagaggagcgattctggcggttcatcaagcgagcctttcgatagacacgcacctgcaatgctgagggagcggggaaccccgcctgtcgatcctaaactcgcatgggtgggagacgtgtttacggcgactccagcggagcccagacctctcaccagcccgttaagacaggccgcagatgaggatgataaaggtatgcggagcgagaccccccctgtccctccccctcctccttacctggcaagttatcctggtttccccgagaacggagccccaggacccccaataagcaggtttcctctagaagaaccgggaccacgacccctgccctggcctcccggatccgacgaggtggccaaaattcaaacgccgccacccaaaaaggaaccacctaaggaagagaccgcccagcttaccggcccagaggccggacggaagcctgcccgtggagtcggctctggtggacagggaccaccacccccacggagggaaagtagaacagaaactcgatggggcccacgcccaggctcctctcggcgtggcattcccccagaggagcccggagcaccacctcgcagggccggaccgattaaaaagcctccccctccaaccaaggtggaggagctgccccctaaaccactggagcagggggacgagaccccaaaacccccaaagcccgacccactgaaaattaccaagggcaagcttggcggtcccaaagaaacccctccgaatggcaatctcagtccagcacccagactcaggcgagactattcttacgagcgagttgggccaacaagttgtagaggcaggggaagaggggaatactttgccagaggacggggattcagaggaacatatggcggacgaggcagaggagcaagatccagggaattccgctcttaccgtgaatttaggggggacgatgggagggggggaggcacagggggtccaaaccatcctccggctcccagagggaggacagcatccgaaaccaggtcagagggcagtgagtacgaagagataccaaaacggcgaaggcaacgtggctcagagactggtagcgaaacacatgaatctgaccttgcaccgtccgacaaggaggctccgacaccaaaggagggaacgctaactcaagtgcccctggcgcctccgcctcccggtgcgccaccatcacctgccccagctcgctttactgccaggggcggacgggttttcacccctcggggtgttccatcacgaaggggcagaggtggagggagaccaccccctcaggtgtgtcccggatggtcaccaccggcaaagtcacttgctcccaagaaaccgccaaccggtcccttgccgccatctaaagagcctctcaaggagaagctcattccgggaccactctcacccgttgccaggggcggttctaatgggggtagtaacgtcgggatggaggatggggagcggcctagacgcagaagacatgggagagcacagcagcaagacaaaccccctaggtttcgacgattgaagcaagagcgggaaaatgctgcccgaggctcagaaggaaagccttccttgaccttgcccgcttccgcccctgggcctgaggaagccctcactaccgtgacagtggctcctgcgccacggagagctgccgctaagtcgccagacctgtctaaccaaaattctgaccaggccaacgaagagtgggagacagccagcgagtccagtgactttacatccgagaggaggggggataaggaagctccccctcctgtactgcttacgcctaaagcagtcggaacccccggtggcggaggagggggtgccgtgccaggcatttccgcgatgtccaggggtgacctctcccagcgggcaaaagacttgagtaagaggtccttttccagtcagagaccgggtatggagaggcagaaccgcaggcccggtcctgggggaaaagccggatcctccggaagctcaagcggcggtggaggcggtggacctggcggaagaaccggccctggacggggtgacaagaggtcctggccttccccaaagaaccgaagccggccaccagaagagcgtcccccagggctgcccctccctcctcccccaccatccagcagtgcagtgttccggctggaccaagtaatccactccaacccagccggaatccaacaagcgttggcccaactgtctagtaggcaggggagcgttacagctcctggtgggcatcctcggcataaacccggtctgccgcaggcgccacagggcccttctcccaggcctcctacccgatatgagccacagagggtgaactcaggacttagcagtgatcctcacttcgaagagccaggaccaatggtgcgaggtgtcgggggtactccgagagacagtgctggagtgtctcctttcccccctaagcgacgggaacgcccacccaggaaaccagagctcctgcaggaagagtcactcccaccccctcattcctccggctttctcggctccaaaccagagggaccagggcctcaggcagaaagcagagacaccggcaccgaagccctcacaccacacatttggaacaggcttcacaccgccacctcgaggaaatcctaccgaccatcgtccatggagccttggatggagccactaagccctttcgaagatgtggccggtacggagatgagtcagagtgacagtggagtggacctctccggggactcccaggtatcaagtgggccatgctctcagaggagctcacctgatgggggactaaagggggcagccgaggggccacctaaacgtcccggtggcagtagcccactgaacgccgtcccttgcgagggcccacccggttctgagcctccccgtagacccccaccagcaccacacgacggtgacagaaaggagctgcctcgggagcaaccactcccccctggccctattggaactgagaggtcccagcgtacagacaggggcacagagcccggacctatccgtccttcacatcggccaggccctcccgtccaatttggtacatctgacaaggactctgatttaagactagtggtcggagattctctcaaggccgaaaaagagctcaccgccagcgttactgaagccattcccgtttcccgggactgggaactcctgccatctgctgctgcatcagcagagccacagagcaagaatctcgactccggacactgtgtgcctgaacccagttccagtggccagaggctgtaccccgaggtgttctacggctcagccggaccctctagctcacagataagtggaggggctatggattcccagctgcacccaaattcaggagggttccggccaggcacccccagcctccatccatacagaagccagcctctatacttgccccctggccctgcaccaccttctgccctcctatccggagtggctctcaagggccagtttttggattttagtactatgcaggccaccgagttgggcaaactgcctgccggaggtgtgttgtacccccctcctagtttcctgtattccccagctttttgccccagccccctgcctgacaccagtctcctgcaggttcgccaggacttgccttcaccctctgatttttattcaacaccactgcaacccggaggccagtccgggtttctgccgtcaggggcaccagcacagcagatgcttctgcccatggtagactcccagcttccagtggtgaactttgggtccctgcccccagccccacccccagcaccaccccctctcagcctgcttcctgttggcccagcactccagccgcctagcttagcagtgaggccccctccagcccctgcgacccgggtgctcccttcgccggctcgcccattccccgcaagcttgggacgtgcagagcttcacccagttgaactgaagcccttccaagactaccagaagctttcatctaatcttggaggcccaggctcctcccggaccccacctaccggccgttcttttagcggccttaacagtagactgaaggctaccccctcaacgtacagcggtgtttttaggacgcagagggtcgacctgtaccaacaagctagtccccctgacgccctccgttggatcccaaagccctgggagagaactggccctccgccacgggaaggcccatcccgcagggcagaggaaccaggatcgagaggcgataaggaacccggactgcctccccctcggta

SEQ ID NO: 344924 - DNA, 6473 bp, Artificial Sequence
  derived and/or modified sequence
atgtcagatcgctctggaccgactgccaagggcaaggatggtaagaaatattcatcgttgaatctctttgatacatacaagggcaagagtcttgaaatccagaaacccgctgtagccccacgacatgggttacagtcgttagggaaggtcgctatcgccaggcgaatgcctccacctgctaatctgcctagcctgaaggccgaaaacaaaggcaacgatccaaatgtgagcttggttcctaaagatggaactggctgggctagcaaacaggaacagagtgatccaaagtcctccgacgcctccaccgctcaaccccctgaatctcagcctctcccggctagccagacgcccgcatcaaaccagcccaagcgccctccagccgctcccgagaataccccactggttccgtccggcgtcaaaagctgggcacaggcttccgtgacgcatggcgcacacggcgatggtggtagagcaagttccctcctatcccgcttctctcgagaggaattcccaactctgcaggccgcaggggatcaggataaggcagccaaagagcgggaatcagccgagcagtccagcgggcctggccctagcctgagaccgcagaattccacaacctggcgggatgggggtggccgagggcctgacgaactggagggccctgattcaaaacttcaccacgggcatgaccccaggggcggactgcagcccagtggtccccctcagttcccaccatatcgaggcatgatgccgccatttatgtaccctccatacttgccttttccccctccatacggaccccaggggccttataggtacccaactcctgacggaccttcgaggtttccgagagtggctggtccaagaggaagtgggcctccgatgcggctggtggagcctgtgggcagaccttctatcctgaaagaggataacctgaaagaattcgaccagcttgatcaggagaatgatgacgggtgggctggggcacatgaggaagtagattatactgagaaactcaagttctctgacgaagaggatgggagggatagcgatgaagagggtgctgaagggcaccgggatagtcaatctgccagcggcgaagagcgtcccccagaggccgacggcaaaaagggtaattcgccaaacagcgagccccctaccccaaagactgcatgggctgagaccagtcgccctcccgagacagaacctggacccccagctccgaaacctcctcttccgcctccccaccgcggtcccgctggcaactggggtcctccgggagattacccagatcgaggcggtcctccatgtaaacccccagcacccgaggatgaggatgaagcctggcggcagaggcggaaacagtctagctccgagatatccttggccgtggaaagagcgaggcgccgacgcgaagaggaggaacggaggatgcaggaagagcgtagagccgcatgcgccgagaaactgaaaaggttagatgagaagttcggcgcaccggacaagaggttaaaagcggaaccagcagcaccccctgcagcccctagcaccccagcgcctcccccagccgtccctaaagagcttccagctcccccagcccctcctccagcctcagcccctacaccagagaccgaacctgaagaaccagcccaggctccacctgcacaaagcactcccacacctggtgtggcagctgcccctacgctggtgagtggaggcggaagcacctctagtacctccagtggaagcttcgaagcatctcccgtggagccacagctcccaagtaaggaaggcccagaaccgccagaagaggtcccaccccctaccactccccctgttccaaaggtagagcccaagggcgatggcattggcccaacccggcaacccccaagccagggactgggatatccaaagtaccagaaatccctcccaccaagatttcaacgccagcaacaggagcagcttcttaagcaacaacagcagcatcagtggcagcagcaccagcagggaagtgcaccacccacccccgtgcccccttctcctccacagcccgtgacactcggtgccgtgcctgctcctcaagcccctcctcctccgcctaaggccctgtacccaggtgctctgggcaggcctccccctatgcctccaatgaattttgacccgaggtggatgatgattcctccttacgttgatcccaggttgcttcaaggcaggccaccactggacttctaccctcctggcgtacatccttctggactggtgccacgagaacggagcgattcagggggttcgtcatctgaaccctttgaccgacatgccccagctatgctgcgagagcggggaacccccccagtcgatcctaagttagcctgggtcggcgatgtttttactgccacacctgccgagccacgtccactgactagtccccttaggcaggccgctgatgaagacgacaaaggaatgagatccgagactccacctgtgcctcccccaccaccatatctcgcgagttatcccggttttccagagaatggcgctcccggaccacctatcagccgatttccattggaggaaccgggacctagaccactcccctggccgccagggtccgacgaggtagccaagatccaaacgccccctcctaaaaaggaaccccctaaggaggagaccgcccagttgacaggcccagaggccggtaggaaacccgcacggggagtcggatcgggaggccagggcccacctcctcccagacgggagagccggacagagacaaggtggggcccacgcccaggcagctcgcgccgtggcatacccccagaagagcccggagctcctccgagaagagccggaccaataaagaaaccaccccctcctaccaaggttgaggagctaccgccaaaaccacttgagcaaggggacgagacccctaaacctcccaagccagacccactgaagataactaaaggaaaactcgggggtcctaaggaaactcctcctaacggcaatctgagccctgccccaagacttaggagagattactcttacgagcgcgtggggccaacaagctgccgtggtcggggtcggggtgagtacttcgccagagggcgtggatttcggggaacttacgggggtcgtggacggggagccaggagccgggagttcaggagctatcgggaatttcgaggagacgacggcagggggggagggactgggggaccgaaccacccaccagcccctcgtgggcgaaccgctagtgaaactaggagcgaaggatcagaatacgaagagatcccgaagaggcgccgacagcgtggcagcgaaacaggatcagaaacccacgaaagcgatctcgcccctagcgacaaagaggctccaacacccaaagagggtaccctgacccaggttccactcgccccacccccacctggcgcacctccgagtccggcaccggctaggttcacagcgagagggggaagagtttttacccccagaggagtgccttctagacgcggtagaggcggtggacggcctcctccccaagtgtgtccaggctggtccccacctgccaaaagccttgctccaaagaagcctccaaccggaccccttccgcctagcaaagaacctttgaaagagaaactcatccccggtccactgagccccgttgcgaggggcggttcaaacggaggatccaatgtggggatggaagacggcgagagaccccgacgcaggcgccatggcagagcgcagcagcaagataaacccccacgcttcagacgcttgaaacaagaacgggagaacgctgcacgaggaagcgagggaaagccttctctcaccctgcccgcaagcgctcctggtcccgaggaggccctcactaccgtgacagtggccccagcaccccgacgggctgctgctaagagccccgatctcagcaaccaaaactccgaccaggccaatgaggaatgggagaccgccagtgagagtagcgatttcacctctgaaagacggggtgacaaggaagctcccccacctgtcctgcttactcctaaggctgttggaacccctggcggaggcggaggcggtgccgtcccgggaatatccgcaatgagcaggggagatcttagccagagagccaaggatctgtctaaacgcagttttagttcgcaacgcccaggcatggagcggcagaacagacggcctggcccagggggtaaagcaggatcatcaggttccagctctgggggtggcggaggcggtcctgggggaagaactgggccaggtagaggagacaagagaagctggccaagccccaagaacaggtcacgccctcctgaagagcgccctcctggtctccctttaccaccaccaccaccttctagtagtgccgtgttccgccttgaccaagtgatccactctaaccctgctggcatccaacaggcacttgctcaactctcgagtagacaaggatcagtgactgctccaggtggccaccctaggcacaagcccggtctccctcaagctcctcaggggccatcccccagaccacccacccgctatgaacctcagcgcgtgaatagtggattgtccagtgacccccacttcgaagaacctggtcctatggttcgcggtgtgggagggactccaagggactccgctggagtgtctcccttccctcctaaacgcagagagagaccccctaggaagcctgagctcctccaagaggagtcattaccaccccctcactctagcggcttcctgggcagcaaaccagagggtcccggaccgcaagctgaatctagggacacagggacagaggccctgacccctcacatctggaaccgtctgcatacagccactagtaggaaatcatatcggccttcatccatggagccctggatggagcccctttctccttttgaagacgtggcagggaccgagatgtcccagtcggattccggtgtggaccttagcggagacagccaggtctcctcgggcccttgtagccagcgctcaagcccagatggcggtctaaaaggtgcggcagagggacctccaaagcggcctggtgggagcagtcctctgaacgcagtaccttgtgagggcccacctggctctgaaccaccacggcgaccccctcctgcccctcatgacggggacaggaaggagttacctcgcgaacagcctctccctcctggcccaatcggtactgagaggagtcagcgtaccgaccggggtacggagcccggtcctattcgaccatcacatcggccaggccctcctgtccaatttggcacatccgataaagactcagatctccgcctggttgtgggcgacagtctcaaagccgaaaaagagctgacggcgagtgtgaccgaagcaataccagtgagccgtgactgggagctccttcccagtgctgcagctagtgccgaaccacagtctaaaaacctcgacagcgggcactgtgtgcctgaaccgagctcgagtggccagaggttgtaccccgaggtgttttatgggtcggctggaccctcttcatctcagatctctggaggtgccatggattcgcagctccaccccaacagtggcggttttcgccctggcaccccttcacttcacccttaccgctcgcagcccctgtatttgcccccaggaccggcaccacccagcgccttgctgtcaggggtggctctaaaggggcagtttctcgatttttccactatgcaggccacagaacttgggaagctgcctgcaggaggtgtcttatacccgccaccaagctttttgtacagccccgctttttgtcctagccctcttcctgatacatctctgctccaagtccggcaggatcttccctccccaagcgatttctacagtacccccctgcagcctgggggtcagtccggctttctgccatctggagcacccgcacagcagatgctcctgcccatggtggacagccagttacccgttgttaactttggaagccttccgccagcccctccaccagctccccctcctctaagtctgcttccagtcggtccggcactccaacccccatccctggcagttcgtccacctcccgctcccgcaacccgtgttctccctagccccgcaagaccctttccagcctccttgggcagagccgagctgcaccctgttgaactgaaaccgtttcaggactaccagaaactctcatctaatctcggcggaccgggttcctcccgaacgccacccaccggtcgcagtttctcaggactgaattcccgactgaaagctaccccttcaacctacagcggagttttcagaacccaacgtgtcgatctataccagcaggcctcacctcctgatgccctacggtggattcctaagccatgggagcgcaccggacctccaccgcgagaagggcctagccgcagagccgaggagcccggaagtagaggggataaggaaccaggcttgccccctcccaggta

SEQ ID NO: 344925 - DNA, 6449 bp, Artificial Sequence
  derived and/or modified sequence
atgtcggaccgctccgggccaactgcaaaaggcaaggacgggaagaaatacagctccctcaatctctttgacacctacaagggaaaatctttggaaatccagaaaccagcagtcgctccccgacatggtctccaaagcttagggaaggtggcgatcgcaagaaggatgccacctcccgctaaccttccttcccttaaggccgaaaataaggggaacgatccaaatgtatcgttggtgcctaaagatggaactggatgggccagcaagcaagaacagagcgacccaaaaagtagcgatgcatccaccgcacagcctccagaatctcagcctctccctgccagtcaaacgcccgcatccaatcagcctaaacgccctccggctgccccagagaacacacctttggtgccctccggcgtaaagtcctgggcccaggcctcagtaacccacggggctcacggcgacgggggtagagcctctagtctcctgtcgcgcttttcgcgcgaggagttcccaactctgcaggcagcaggagatcaagacaaggcagcaaaggagcgggagtctgccgaacaatctagtggccctggaccaagtcttaggccccaaaattccaccacctggcgcgacggaggcggtagggggccagatgaactggagggaccagattccaaactccaccacggccacgatccacggggtgggctgcagccttctggcccaccgcagttcccaccctatcggggtatgatgccaccatttatgtacccaccctacctgccgtttcccccaccgtacgggccacaaggcccttaccggtatcccacacctgacgggcctagccgctttcccagggtagcgggacccaggggcagcggccctcctatgagacttgtagaacccgtgggacgcccttctatcctgaaggaggataatttgaaggagtttgaccagttggatcaagaaaatgacgatgggtgggctggcgcacatgaggaagtagactatactgaaaagctcaagttctctgatgaggaagacggacgcgacagcgacgaagaaggtgccgaggggcatcgagattcccagagcgcctccggagaggagcgccctcccgaagccgatggcaagaagggcaactcccctaactctgagcccccaacgccgaaaacagcatgggcagagacgtccagacctccagagaccgagccaggaccgcctgccccaaagccaccattaccccctccccatcggggtccagcagggaactggggcccacctggggactatcctgatcgcggagggcctccatgtaagccacccgcacccgaggatgaggatgaagcttggcggcaacggagaaaacaaagttccagtgagatttccctagccgtcgagcgggctagacgcaggagagaggaggaggagcgcaggatgcaggaagagcgccgagctgcatgcgcggaaaaactgaagcggctggatgagaagtttggagcccctgacaagaggctgaaagctgagcctgcagccccaccggcagccccatcaacccccgcacctccacccgctgtgcccaaggagcttccggctccccctgccccaccccctgcatctgcacccaccccagaaactgagcccgaagagccagctcaagccccaccggctcagagtactccaacaccaggcgttgcagccgctcctacccttgtgtctgggggtggcagcactagtagcacttccagcggaagctttgaagcgagccctgtggaaccccagctgccatcaaaggaaggcccagagcccccagaagaagttcccccacctacgactccaccagtgccaaaagttgaaccaaaaggggacggcattggtccgaccaggcagccaccatcacagggacttggctaccccaaataccagaaatctttaccccctagattccagcgacaacagcaagaacagctgctaaagcaacagcagcagcatcagtggcaacagcatcagcagggttctgccccaccaactccagtcccaccgtctccaccccagcccgttacacttggcgctgtgcccgctcctcaagctcctcctcctcccccaaaagcattatacccaggagccctgggtcgcccacccccaatgcctccaatgaacttcgaccccagatggatgatgattcccccttacgttgatccgagactcctgcagggacggcctcctctcgatttttatcctcctggcgtgcatccctccggcctggtcccacgcgaacggtccgattccggtggctcatcgagcgagcctttcgaccggcacgcacccgctatgctacgtgagcggggaactcctcccgtggacccaaaactggcctgggttggcgacgttttcacagccaccccggctgagccaaggccccttaccagccccctgaggcaagccgctgatgaagacgacaaggggatgagatcagaaacacccccagtgcctccaccccctccctacttggcttcttaccccggttttcctgagaatggagcaccgggacctccaatatcccggttccccctcgaggagccaggccctcggccacttccatggccgccaggatccgatgaagtcgcaaagatacagactccgcctcccaagaaggaaccaccaaaggaggaaaccgcacaattgaccgggcctgaggcaggcagaaaacctgctcggggtgtggggtctggtggccaggggcctccccctccccgtagggagtccagaaccgaaacccgctggggacctcgccctggatcttcacgtcgaggcatcccgcctgaggagcctggtgcacctcccaggcgagcaggaccaattaaaaaacctcccccacctaccaaggtcgaagaactgccgcctaagcctctggagcagggagacgaaacccccaagcctccaaagcctgatccactcaagattacaaagggaaagctcggaggcccaaaggagacaccccctaacggcaatctgagccccgcaccaaggctcagacgcgattactcatacgaacgggttgggcctacctcttgcaggggcagggggaggggagagtattttgccagaggtcggggatttcgtggtacatatggcggacgcggaagaggcgcagcgggaaattccgctgtaacagaatcatttgaggagatgatgggtgtggaggtgggtcagggcgatcagactacccttctattgcccgaggctgctctgcctgctcgccacggggcacgagttcagagtatgcgtaaaagccctagtggcgctggcagcggggctcagaaacaggctgctagaccaatgagggtgatctggttgctacagacccgcagactgccacatcccagacgtgagcatagtccgagatctagatcaccaaccactcggtctccaacatttcccgcaccagccaggtttacccccggagtgggggagtcgagtcttcctgaaggaatctcacccggacccaggcgaagagaaccaccacaggtttgtcccggttggtcccctcctgctaagagtctggccccaaaaaagcctccaacaggaccactgcccccatctaaggagcccctgaaggagaagctgatccctggaccgctgtctcctgttgccaggggcggatcaaatggcggtagcaacgtgggcatggaggatggagaacgccctaggcgacggaggcacggcagagcccaacaacaggataagccaccaagatttcggagactcaagcaggagcgggagaatgctgcacgtgggtctgagggcaagccgagtctgacattacctgcctctgcacctggccctgaggaggcattaaccaccgtgaccgtcgctccagcaccacgcagggccgctgcaaagtcaccggatctctccaaccagaactcggatcaggccaacgaggaatgggaaaccgctagcgaaagcagtgattttacttctgagcgaaggggggacaaggaagcaccgcctcctgtactcctgacacccaaggcggtgggaacaccgggtggcggagggggaggagccgtacctggaatttccgccatgtccagaggagatctttcccagagggcaaaggatttgtctaagcgttcttttagctcccagcgccctggcatggagagacagaacagaagacccggacccggtggtaaagccggaagttctggtagcagctctggtggaggcggaggcggtcccggtggacggacgggtcccggtcgcggagataaacggtcctggcctagtcctaagaatcggtcaaggcctcccgaggagcgtcctcccggtctgcctctgcccccaccccctccatcctccagtgccgtgttcagacttgaccaggtgattcacagcaatcccgcaggaattcaacaggcgctcgcccagttaagctctagacaggggtctgtcaccgcaccagggggacatcctagacacaaaccaggcctaccgcaggcacctcagggcccttcaccaaggcctcccacaaggtatgaaccacaacgcgtcaacagcggattaagctccgatcctcatttcgaggagccaggccctatggtacgtggcgtaggcggtacacctagagactctgcaggcgtgtcaccttttcctcccaagagacgggagaggccaccccgaaagccggagctacttcaagaagaatcactgccccctccccattcatctggatttttgggcagcaaaccagaggggcctggcccacaggctgagtcaagagacacggggacagaggctctgaccccacacatttggaaccggctgcacacagccacttcgcgcaagtcctatagaccttcttctatggaaccatggatggaaccgctctcccctttcgaagacgtagctggcactgaaatgtctcaaagcgacagcggcgtggatttaagcggcgattctcaagtaagctctggaccttgctcccaaagaagcagtccagacggcggactcaaaggtgcagctgaggggccacctaagcgccctggcggatctagcccccttaatgctgtcccgtgtgagggtccgcctggctccgaaccgcctcgcagaccacctcctgctccacatgacggggataggaaagagctgccgagagagcagcctctaccgccaggccctatcggcaccgaacggagccaaaggacagaccgaggaaccgagccgggtcccatcagaccaagccaccgaccaggtcccccagtgcagtttggcacttccgataaggatagtgacctgcgtctcgttgtcggcgatagcctgaaggctgagaaggagcttaccgcctctgtaacggaagccatccctgtgtcccgcgactgggagctgctccctagcgccgcagcctctgctgaacctcagtccaaaaacctggacagtgggcactgcgtacctgagccgagtagttcaggccagcgactgtatcccgaggttttttatggaagtgccggaccctccagctcgcaaatttcaggtggccatggcttaagcataacatcaaagcagtggaggcggccaggcactccatctttacacccctaccgctctcagcctctgtacctcccacccggtcccgcaccgccatccgcgctgctgtccggcgtggccctcaagggccagttcctagattttagcacaatgcaagctaccgaactcgggaaactgccagccggtggtgttctgtatcccccaccgagttttctgtactcccccgctttctgcccatcccccctgccggatacatccctgctgcaggtgcggcaagatcttcccagcccctccgacttctattctactccactgcagccgggagggcagtcaggattcctgccgtccggcgcacccgctcagcagatgcttctacccatggtcgattctcagctgcccgtggttaacttcggctcactgccacctgcacctcccccagctccccctcccctcagcctgctccctgtcggcccagcacttcaaccgccaagcctggctgtgagaccaccgccagcccctgccactagggtgttgccaagcccagcgaggccatttccggctagcctgggtcgcgctgagctgcatcctgtagagcttaaaccatttcaagattaccagaaactcagcagcaatctcggaggaccagggtcatctcgaacaccgcctacggggaggtcattttcgggcttgaattctcgactgaaagctacaccttctacctacagtggcgtttttcggactcaaagagtggacctgtaccagcaggccagccctccagacgctctccgctggattccaaaaccttgggagcgtacaggacctcccccaagagaagggccttctcggcgagccgaggagcccggaagtcggggtgacaaggagcccggactccccccacctcgcta

SEQ ID NO: 344926 - DNA, 6416 bp, Artificial Sequence
  derived and/or modified sequence
atgtcagaccggtcaggcccaaccgcaaagggaaaagacggtaaaaagtattcatccttgaacttgtttgacacatacaagggcaagtccctcgaaattcagaaaccagccgttgcccctagacacggccttcagagtctcgggaaagtagcgatagctagaagaatgcccccacctgcaaatcttcccagcctgaaagctgagaacaagggcaatgaccctaatgtatcgctggtgcctaaagatggtactggctgggcaagtaaacaagagcagtccgaccctaagtcgtctgacgccagcaccgcgcaacctccggagagccaacccttgcctgcatctcagacacctgccagtaaccagccgaagagacctcccgctgctccggagaatacacccttggtgccctccggcgtgaaatcctgggctcaggcaagcgtaacccacggggctcatggcgatggaggaagagcaagtagcttactgtcacgattctcgcgtgaagagttcccaactctccaagcagccggagaccaagacaaagccgcaaaggagagagagtctgctgaacagtcttcaggtcctggccctagtttaagaccccagaacagcacaacgtggcgcgacggcggtggtcgaggcccagacgagctggaaggccctgacagtaagctgcatcacgggcatgatcctaggggaggcctccagcctagcggccctccgcaattccctccctatcggggaatgatgcccccattcatgtatccaccctacctgccgttcccccctccgtatggaccccagggcccatatcgctaccctaccccagatgggccttcccggtttcctagggtggctggtccgcgaggctccggaccccctatgaggctggttgagcccgtgggaagaccgagcattttaaaggaggacaaccttaaagaattcgatcagctggaccaggaaaatgacgacggatgggctggcgcacacgaagaggttgattacacggagaaactcaaattctccgacgaggaggatggtcgcgattcggatgaggagggagctgagggtcaccgagattcccagtccgcctctggcgaagaacgccctcccgaggctgacggcaagaagggaaatagtcccaatagtgagcccccaacgccaaaaactgcttgggcggagacgtctaggccacctgagaccgagcctggcccaccagccccaaaacctcccctgccccctccaggcgactacccggatcggggaggccctccatgcaagccacccgctcccgaggacgaggacgaggcatggaggcagcggagaaagcaatccagctccgagatttcgctggctgtggagagggccagaaggagacgcgaagaggaagaacgacggatgcaggaggagcgtcgagccgcatgtgctgagaagctcaagcggctggatgagaaattcggagctcctgataaaagactcaaagccgagccggcagcaccacccgctgcaccctcgacacccgctcctccacccgcagtcccaaaggaactacccgcaccacccgcacctccaccggctagtgcccctactccagagacagagccggaggaacccgcacaggcccctcccgctcagtcaacaccaaccccgggtgtggcagccgcacctacactcgtgagcgggggagggagcacgagctccacttcaagcggttcttttgaggccagtcctgtggagccgcaactgccatctaaagagggccctgagccccctgaagaggtgccgccaccgactacccctcctgtgcctaaagtcgagcctaaaggggatgggataggaccaacaaggcaaccaccatcccaggggctgggataccctaagtaccagaagagcctgcctccgaggttccagcggcagcagcaggagcagctgctcaaacagcagcagcagcaccaatggcagcagcaccagcaggggtcagcccctcctacgccagtgccacccagccctccgcagcccgtcacgctcggagcagtgcccgctccacaggctccccctcctcccccaaaggcgctgtacccaggcgctctgggacgtcctcctcctatgcccccaatgaatttcgacccgcgttggatgatgatcccgccatatgtagaccccaggctgcttcaaggtcgacctcccctcgatttctaccctccaggagttcatccttcgggtctggtccctagggagcgcagcgacagtggaggatcgagcagcgaaccatttgaccggcacgcacccgcaatgcttagagaaagagggactccccctgttgaccctaagctggcctgggtgggcgacgtgtttactgctacacctgctgagcctcgcccattaactagcccgctgcggcaggcagccgacgaagacgacaaaggcatgcgttctgagacccccccagtgccaccgcctcccccttacttagcctcgtatccagggtttcctgaaaatggggcacccggacccccaattagccgttttcctctggaggagcccggaccgcgacccctaccctggccccctggttctgacgaggtggcaaagatccagactccgccacctaaaaaagagccgccaaaagaagagacagctcagctgacagggccagaagccggacgcaaaccggcacgaggggtcggttccggaggccagggcccaccccctcccagaagagagagtaggaccgagactagatggggccctcgccctggaagttctcggcgaggcatcccaccggaggagccaggcgcacccccaaggcgagcagggccaatcaaaaagccaccaccacccacgaaggttgaggagctcccccctaagccactcgagcagggtgatgagactccaaaacctcctaagcccgatccactgaagattactaaaggtaaattggggggacctaaagagacacccccaaacggtaatctgtctcctgcccctcgcctccgacgtgactattcctacgagcgggtaggtcccaccagctgtagaggcagaggcagaggcgagtactttgcacgcggacgaggctttaggggcacgtatggcggacggggaaggggggcagccggtaattctgccgtgactgagtcctttgaggaaatgatgggggtagaggttggacagggagatcagaccactcttcttttgcccgaggctgccctgcccgctaggcatggtgcgagggttcagtccatgcgcaagtccccttcaggagcgggttctggagcacagaagcaggccgctaggcctatgagggtgatttggctgctacagacccgaagattgccacacccacggagggagcacagcccaaggtcgcgcagtcctactacacggagtcccacttttcctgcgcctgccagatttacccccggtgtgggagagtcaagcttgcctgaaggcatcagccctggacctcgccgacgcgagcctcctcaagtctgcccgggatggagcccccctgccaagtctctcgccccaaaaaaaccccctactggtccactgcctccctccaaagaacctctgaaggaaaagcttatcccgggtccactgagtcccgtagccaggggcggttccaatggcggatccaacgtgggaatggaggacggggagagacccagacgaagacgtcacggcagagcccagcagcaggacaagccacctaggttccgaaggttgaagcaggagcgggaaaatgcagctcggggtagcgagggtaaaccttccttgacattgcctgcaagcgcgcctggcccagaggaagctctgaccacagtaaccgtcgcgcctgcccctaggagagctgccgctaagtcacccgacctcagtaaccaaaattctgaccaggctaacgaggagtgggaaaccgccagcgaaagttcagacttcactagtgagagacgaggggacaaagaggctccaccaccagtgctgttgactcccaaggccgtgggcaccccaggcggtggagggggaggagcagtgcccggaatttcagccatgtctagaggggacctgtcgcagcgagctaaggatctaagcaagcgttccttctcttcgcagaggccgggaatggaacgccagaataggcggccagggcctggcggtaaagcgggaagttccggaagtagttcaggtgggggaggcggaggcccaggaggaagaaccggcccaggacgaggggacaaacgatcgtggcccagcccaaaaaacaggagccgcccacccgaggagcgtcctcccggtttgcctctgcccccacctcctccgtctagcagtgccgtgtttcggctcgatcaggtcatacactccaaccctgctggtattcagcaagccttggcacagctgtcctcccggcaagggagcgtgaccgctcccggaggccacccaagacataaacctgggcttccacaggcaccgcagggcccttcgcccagaccaccgactagatatgagccccagagggtgaatagtggcctctcaagtgacccccattttgaggagccaggccctatggtgcgcggtgtgggtggtaccccacgtgactctgccggtgtctccccattccctccgaagcgccgagagcgcccacctcggaagcccgagctgttacaagaggagtcactcccgcctccccacagctccgggtttctgggaagcaaacccgagggacctgggcctcaagcggagtcaagagacacaggtaccgaggctctcactccacatatctggaacaggttacacactgccacctcacgaaagtcttacagaccttcttccatggaaccctggatggagccactctctcccttcgaagacgtcgcaggcacggaaatgagccaatctgatagcggggtcgatctatccggcgacagccaggtatctagtggcccatgttcacagaggagcagccctgatggtgggctgaagggtgctgcagaaggacctcctaagcggccaggtggaagctcccctttgaacgccgtaccctgtgaaggcccaccagggtccgaacctcctagaaggcctccacccgctcctcacgacggggatcgtaaagagctccccagggaacagcctctgcctccgggaccaatcggtaccgaacgatctcagcgaacggacagaggcacagaacctggtcccatcaggcccagccatcggcctggccctccagtgcagtttggcacgagcgataaggatagcgacctgcgcctggtggtaggtgacagtctcaaagccgaaaaagagctgacagcctcagtcaccgaggcaatccccgtatccagggactgggaactgctgccctctgcagccgcaagcgccgagcctcagagcaagaatttggactccggacactgtgtccccgagccctccagcagcggccagcgcctgtaccccgaggtattttatggttctgccggtcctagcagctctcagatctcaggagggcatggactctcaatcaccagcaaacagtggcgaaggccaggtacccctagccttcatccatatagatcacaacctttatacctgcctcccggaccagcgccaccctcagcactcttatctggagttgcccttaagggccagtttctggatttttctaccatgcaggccaccgaactgggcaagttacccgcaggcggtgtcctatacccgccaccctcattcctctactcacctgccttttgtccctcccctctgcccgacaccagtcttcttcaagtacgacaagatctccctagcccttccgatttctatagcactccactgcagcctggcggacagagtgggttcctcccatccggagcaccagcccaacagatgctactgccaatggtggattcccagctgcccgtggtcaattttgggtctctgccccctgcaccaccgccagcccctccacccctatctctgctgcctgtaggtccagcacttcagccaccttcactcgccgtcagacccccacctgcaccagcaactcgcgtacttccatctcctgccaggccctttcccgcttctctaggcagggccgagcttcaccctgtggagctcaagccctttcaggattaccaaaagttatccagtaatcttggaggccctggaagcagtcgcacaccacccactggacggtctttctccggactcaactctaggttgaaagcaactccttcgacatatagcggagtgtttaggactcagcgcgttgatctgtatcaacaagcgtctccacccgatgctctccggtggatccctaagccttgggagagaacaggcccaccccctcgggaaggcccttcacgacgagccgaggaaccaggatcaaggggagataaggaaccagggctgccgccaccgagata

SEQ ID NO: 344927 - DNA, 4149 bp, Artificial Sequence
  derived and/or modified sequence
atgctgagggaacggggtacccctcccgtggacccaaaattggcttgggttggagacgttttcactgccaccccagctgagccaaggcctctgacctctccgctgcgacaagccgctgatgaagacgacaaaggtatgcggagcgagacccccccagtgcctccaccaccgccttatctggcctcttacccgggattcccggagaatggcgctcccggaccgcctatcagcagatttcctcttgaggagccaggcccacgaccactcccgtggccccctggttctgatgaagtagccaaaatacaaacgccgcctccaaagaaagagcctcctaaggaagaaaccgcccagttaaccggcccagaggcaggtaggaagcctgccaggggtgtaggctctgggggacaaggtccccctcccccacgcagggagagcaggaccgaaactagatggggccctaggccaggctcttcacgacgcggtatccctccagaagaaccaggggctcccccacgacgcgctgggcctataaagaaaccccctccacccactaaggtcgaggagcttccccctaaaccactggaacagggagacgaaaccccaaagccgcctaaaccggatcccctgaaaatcacgaaaggtaaactgggtggacctaaagaaacaccacctaatggtaacctgtcccctgctcctcgtctcaggcgcgactacagctatgagcgcgtgggcccaactagttgtaggggcagaggcaggggggaatatttcgcgaggggcaggggcttccgaggcacatatggaggaagaggaaggggtgctaggagccgagaatttagatcctatagagaattccgcggagacgacggacgtggcggaggtacagggggacccaatcacccacctgctccacgcggacgaacagcttccgaaacacggagcgagggttcggaatatgaggagatcccaaagagacgtcggcagagaggaagtgagactggatcagaaacccacgaatccgaccttgctccgtcagataaggaggcccctacccccaaagaggggaccctgactcaggtgcccctggcacccccaccacccggtgctcccccaagccccgcaccagcccgatttactgcaagggggggtcgtgtgtttacccctcgtggggtgccttctagacggggacggggtggcggaagaccaccgccacaagtgtgccccggttggtcgccgccagccaagagcttagcacccaagaagccgcctactggccctcttccaccctcaaaagaaccactgaaggagaaactgatccctgggcctctgtctccagtggcacggggtggctctaacgggggaagcaacgtcggcatggaagacggagagcgcccacggaggcgacgtcacggacgcgctcaacagcaagacaaacccccaagattcagaaggctgaagcaagagagagaaaatgccgctcgcggaagtgaaggtaaaccaagtctaactcttccagcctctgcccctggtccagaagaggcactgactaccgtgacagtggctcctgctcccaggcgtgctgccgctaaaagccctgatctgagcaaccagaactccgaccaggccaatgaggagtgggagaccgcttctgagtcatctgacttcaccagcgagcgcaggggcgacaaagaggcccctcctccagtccttttgacccccaaggccgtaggcactcccggtggagggggaggtggagctgtccctggcatcagcgctatgagcaggggcgacctttcccagcgtgctaaggatctgtctaaacgctccttttcaagccagcggccaggaatggagcgacaaaatcgcagacccggacccggaggcaaagcgggatcatcaggaagctccagcggaggcggagggggtggtcccggaggcaggacgggtccaggtaggggtgacaagcggtcctggccatcacctaaaaatcggtcacgacccccagaggaacgcccaccgggtctacctctccccccaccaccaccctctagttccgccgttttccggctcgaccaggtgatccactccaaccctgccggaattcagcaggccctggcccagttgtccagccgccaggggtctgtcactgcacccggaggccaccccaggcataaacccggactgccccaggcaccacagggaccctcaccaaggcctccgactcgttatgagccccagagagtcaattctggactgtctagtgatccccacttcgaagaacctggccctatggtgcgtggggtcgggggaactccaagggattccgctggagtgagcccattcccccctaaacgacgtgagcgccctccccgtaagcccgagctgcttcaggaggagtccctcccgccacctcactcaagtggcttcctaggatcaaagccagagggcccagggccacaagccgagtccagagacacgggcaccgaagcccttactccgcatatttggaatcgtttgcacacagcaacttcccggaagagctaccgtccaagctcaatggagccctggatggagccattaagcccattcgaagacgtcgcaggaaccgagatgagccagtccgactccggggttgatctgagcggggattcgcaggtatcaagcggtccttgttctcagcggtcctcaccagacgggggactcaaaggcgcagccgagggacctcctaaacggccagggggatcctcgccacttaatgcagtgccatgcgaaggtccgcctgggtcagagcctcctcgaaggcctccgcctgcacctcacgatggcgacaggaaagaactccctagggagcagcctctgcctcccggacctatagggaccgagcgctctcaacgaacagatagaggtacagagcctggcccaattcgtccatcacacagaccagggccacccgtccaattcgggacttccgataaggacagcgacctacgcttagtggtaggggactctctgaaggccgaaaaggaactcactgcaagcgtcactgaggccattccggtctcacgcgattgggagctccttcctagtgccgctgcgagcgcagagccacagtcaaaaaacctggacagtggacactgcgttcctgagccttcatcgagcgggcaaaggctctacccagaggttttttatggaagcgccggacctagtagttcacaaatttccggtggggctatggattcccaacttcaccccaattccggcggatttagacctggaaccccttctcttcacccataccgctcccagccactgtatctgccccctgggcctgctcctcccagtgccctgctgtccggtgtcgctctgaagggtcagttcttagatttttcaaccatgcaggcaaccgaattgggtaagctccccgctggcggagtcctatatccgccaccttcatttctctattccccagctttctgtccctccccccttcctgatacaagtttactgcaggtacgccaagacctaccgtcaccaagcgacttttacagtaccccgctgcagccagggggacagtctggattcctcccttctggcgctcccgcacagcaaatgctgctccctatggtcgactcgcagttgcctgtagtgaacttcgggtcattacctcctgcccctcctccagcaccacctccacttagtctgctgccggtgggaccagctttacagcccccatccttagccgtaagaccccctcctgctcctgccactcgggtattaccctcacctgcccgaccttttcccgcttcgttgggcagggccgagttacatccggtggagctcaaacctttccaggattatcagaagctatcttcaaacctcggtggcccaggcagctcccggaccccacccacaggacgctcattctctgggctaaactcccgacttaaagcgacacctagcacttatagtggcgtcttccgaacacagcgcgttgatctataccagcaggcctcaccaccagacgccttgcgctggatccctaaaccgtgggagaggactggaccccctccacgggagggtccttcaaggagggcagaagaaccaggatctcgcggagacaaggagcctggactgccgccacccagatag

SEQ ID NO: 344928 - DNA, 6893 bp, Artificial Sequence
  derived and/or modified sequence
cagccgcggagtgagcgagggagacgggaggagccgaacccggcgccatccgccgccatcctcccccgccccaccgccatcccgtcccggggagcccctaggcccgggtcccggatccccgcgcacccggccaggggacagagactgagacacttgctgtctggcccacaggctctggcacgttttgggggaggtgcctgcaggacccaacatactcaatgagcttccagcgcaatgtccgatcgctcggggccgactgccaagggaaaggatggaaagaagtattcctcgctcaacctgtttgatacgtataagggcaagtccttagagatccagaaacccgctgttgcccctcgccatggcctgcagagtctcgggaaagttgccattgcccggcgtatgccacctccagccaaccttccaagcctgaaagccgagaacaaaggcaatgaccccaatgtctcactagtgccaaaagacggaacaggatgggcaagcaaacaggagcagtccgaccccaagagttccgatgcctcaaccgctcagccgccggaatcgcagccactgccggcttcacagacgcctgcctccaaccagccgaaacgacccccagcagcccccgagaacactcctttggttccaagcggggtaaagtcctgggcacaagccagcgtcacccatggagcacatggagatggtggaagggcatcaagcctactgtcacgattctctcgagaggaatttccgaccctgcaggcggctggcgaccaggacaaggctgccaaggaaagggagtctgccgaacagtcgtctgggcccggaccaagcctccgcccccaaaattctacaacttggagggacggaggtgggcgtggccctgatgagctggagggcccggactccaaacttcatcatggtcatgatccccggggtgggctacagccttcaggcccaccccagttccctccctaccgcggaatgatgccgcctttcatgtatcccccatatctcccgttccctccgccctatggaccccaggggccttaccgataccccactcctgatgggcccagccgttttccccgtgtggcgggcccccgaggctcagggccaccaatgcgcttagtagagcctgtgggtcgtccctctattctcaaagaggataatctcaaagagtttgatcagttggatcaggagaatgatgatggttgggcaggggcccatgaagaggttgactacactgaaaagctcaagttcagcgatgaggaagatgggcgagactctgatgaggagggagctgagggccacagggattcccaatcagcttctggtgaggaacggccccctgaagcagatggcaaaaagggcaactcccccaacagcgaaccgcccactcctaagacggcctgggcagaaacctctcggcctccagagacagagccgggacctcctgccccaaagcctcccctacccccacctcaccggggccccgccgggaactggggcccccctggggactacccagatcgtgggggtcctccctgcaagcccccagcacctgaagatgaggatgaggcatggcggcagcgacgaaagcagtcgtcatctgagatttccctggcagtggagcgggcccggcgacggcgagaagaagaggagcggcgcatgcaagaagagcgccgggcagcctgtgctgagaagctcaagcgactcgatgaaaagtttggggcacctgacaagcggctcaaagcagagcctgctgccccacctgctgccccttctaccccagctccaccacctgcagtccctaaagaactccctgcacctccagctccacctccagcatcagccccaacaccagagacagaacctgaagagccagcacaggcccctcctgcccaatctactcctactccaggtgtggctgcggctcccactctggtgagtggtggtggcagtaccagtagcaccagcagtggcagcttcgaagccagcccagtggaaccacaactgccctcaaaagagggtcctgaaccaccagaagaggttcctcctcctaccacacccccagttccaaaggtggaacccaagggtgatgggattggtcccacccgccagccccctagtcagggcttgggctaccccaaatatcagaagtcgttgcctcctcgtttccagcggcagcagcaggagcagctcctgaagcagcagcagcagcaccagtggcagcagcatcaacagggctctgcccctcctaccccagtgcccccatcaccaccacagcctgtgaccctgggggctgtgccagctccacaggctccacccccgccccccaaggccctgtacccaggtgctctgggccggcccccacccatgcccccaatgaactttgatccccgatggatgatgattcctccttatgtggacccccggctcctccagggtcgtccccctctagacttctaccctcctggtgtgcatccctctggcctagttccccgagagcgttcagacagtgggggctcaagctcagagccatttgaccgtcatgcacctgctatgttacgggaacggggcactccaccggtggatccaaagttggcctgggtaggagatgtcttcaccgccacacccgctgaaccccgcccacttacctcacctctgcgccaggctgcggatgaggatgacaaggggatgaggagcgagactcctccagtacctcccccaccaccctatctggccagttatccaggctttcctgagaatggagcccctgggcccccaatctctcgctttcctctggaggaaccagggccccgtccactcccctggcccccaggcagtgatgaagtggccaagatacaaactccaccacccaagaaggagccccctaaggaggagactgcacagctgacggggccagaagcaggccgaaagcctgcccgcggagtcgggagtggaggccagggccccccaccaccacgcagagagagtcgcacagagacccgctggggccctcgtccagggagcagtcgtcgtggaatccctccagaggagccaggggccccaccccgccgggctgggcctataaagaaacctccaccacctacaaaagtagaagagctgcctcccaagcccctcgaacagggggatgaaacccccaaacccccaaagccagacccactcaagataaccaaggggaagctagggggccccaaggagaccccacccaatggaaatctttcccctgccccaaggcttcggagggactattcgtatgaaagagtgggtcctacctcttgccggggtcggggccgaggcgagtattttgccagagggaggggttttcgggggacctatgggggacgagggcggggagcccgaagccgggaattccgcagttaccgagagtttcgaggagatgatgggcgtggaggtgggacagggggaccaaaccaccctcctgctccccgaggccgcactgccagcgagacacggagcgagggttcagagtatgaggaaatccccaagcggcgccggcagcggggctcagaaacaggcagcgagacccatgagagtgatctggctccttcagacaaggaggctcccacacccaaggagggaacactcacccaggtccctctcgctcccccaccaccaggagccccaccttcaccagccccagcccgcttcactgcccggggtgggcgagtcttcactcccagaggggtgccatctcgccggggccgaggaggagggaggccccctcctcaagtttgcccaggctggagccctccagccaagtctctggctcccaagaaacctcccacaggccctttgccaccaagtaaggagcctttgaaagagaagttgatcccagggcctctgtcccctgtggcgcgcggaggcagcaatggaggtagcaatgtgggcatggaagatggggagcgaccccgaaggaggcgacatgggagggctcagcagcaggataaaccgcctcgtttccggaggctgaagcaggaacgggagaatgccgcaagggggtctgagggcaagccctccctaacccttccagcctccgctcctggacctgaggaggccctcacaacagtcacagtggccccagcacctcgccgggcagctgccaagtctcctgatctgtcaaaccagaactcagaccaagccaatgaggaatgggagactgcatcagagagcagtgacttcaccagtgagcgccgaggggacaaagaggcacccccaccagtactgctgacacccaaggctgtgggaactcctgggggaggtggaggtggagccgtaccaggtatttcagccatgtcccgcggagatctgagccagagagccaaggatttgagtaaacggagcttctcaagtcagcggccaggcatggaacggcagaatcggcgccctggcccagggggcaaggctggcagcagtggcagcagcagtggaggaggcggtgggggtcctggaggaaggaccgggccaggacgaggcgacaagaggagctggccctctcccaagaaccgaagtcgtcctccagaggagcgtcccccggggcttcccctgcctcccccacctcccagcagttctgctgtcttccgcctggaccaagttatccacagcaaccctgctggcatccaacaggctctggcccagcttagtagccgtcaagggagtgtaactgcaccagggggtcatccaaggcacaagcctgggcttccccaagcccctcagggcccctctcctaggcccccaacccgatacgagccccagagggtcaacagcggcctcagttctgacccccactttgaggagccggggccaatggtgagaggggtgggtgggactcctcgggactctgccggggttagtccctttccccctaaacgtcgggagcggcctcccagaaaaccagagctgctacaggaggaatctttgccacctcctcatagctctggattcttgggctctaagcctgagggcccaggccctcaggcagagtccagagatacaggcacagaggccctgacccctcacatctggaaccgtttacatactgccactagccgaaagagttaccggcccagctccatggagccttggatggagcccctgagtccttttgaggatgtggctggcacagaaatgagtcagtctgacagtggggtggacctgagtggggattctcaggtgtcatcaggtccctgcagccagcgaagttcccctgatggaggactcaagggggcagcagagggaccccccaagaggcctggaggctcctcacccctgaatgctgttccttgtgagggtccacctggctctgaacctcctaggagaccaccacctgccccccacgatggggacagaaaggagctgccccgggagcagcctctgccccctggccccattggcacagaacgatcacagcgtacagaccgaggcacagagcctggccccattcggccatcccatcgacctggtcccccagtccagtttggcactagtgacaaggactcagacttacgcctagtggtaggagacagcttgaaagcagagaaggagctaacagcatcagtcactgaggccattcctgtatcacgagactgggagctgcttcccagtgctgctgcctctgctgagccacaatccaagaacctggattctgggcactgtgtcccggagcccagctcctcaggccagcgcctgtatcctgaggttttctatggcagtgctgggccttccagttctcagatctctgggggagccatggactctcaattacatccaaacagtggaggcttccgccctgggacaccctcactgcacccttacagatcacagcccctatacctaccccccggcccagcccctccctcagcactgctctctggggtagctctcaagggccagtttctggatttctccacaatgcaagctacagagctggggaagttgccggctggaggagttctctaccctccaccttccttcctctactctccggctttctgccccagtcctttgcctgacacatcgttgcttcaggtacgccaggatctgccatccccttcggatttttattctactcctctgcagcctggtggccaaagtggctttctcccttcaggggctcctgcccagcagatgcttctacccatggtagactcacagctgcctgtggtgaactttggctccctgccgccagcaccacctcctgccccacctcccctttctctgttacctgtgggccctgctctgcagccccccagcctggctgtgcggcccccacctgctcctgctactcgggtgctgccttcacctgccaggcccttccccgctagcttggggcgagcagagctgcatccagtggaactaaagccgttccaggattatcaaaaactgagcagcaaccttgggggacctggatcatcacggactcccccaactggaaggtccttctctggcctcaattcccgtctcaaggccacgccttccacctacagtggagtcttccgcacccagcgcgtcgacctttaccagcaggcctccccaccagatgccctgcgctggatacctaagccttgggagcggacagggccgccacctcgagaagggccctcccgacgggcagaggagcctgggtcccgaggggacaaggagcctgggttgcccccaccccgctgagggagttcctcttgccccctacccccggggcttgtatatagattataaatatataagggggaaaggggtgggcggggaggggttgtggggctggggcctcacttcccctcctcccccttcccctggtcccctgtccctggggctgtttgttaaaaaagagtaataaaaggatttaaaaaaaaaaa

SEQ ID NO: 344929 - DNA, 6861 bp, Artificial Sequence
  derived and/or modified sequence
gggctcagccgcggagtgagcgagggagacgggaggagccgaacccggcgccatccgccgccatcctcccccgccccaccgccatcccgtcccggggagcccctaggcccgggtcccggatccccgcgcacccggccaggctctggcacgttttgggggaggtgcctgcaggacccaacatactcaatgagcttccagcgcaatgtccgatcgctcggggccgactgccaagggaaaggatggaaagaagtattcctcgctcaacctgtttgatacgtataagggcaagtccttagagatccagaaacccgctgttgcccctcgccatggcctgcagagtctcgggaaagttgccattgcccggcgtatgccacctccagccaaccttccaagcctgaaagccgagaacaaaggcaatgaccccaatgtctcactagtgccaaaagacggaacaggatgggcaagcaaacaggagcagtccgaccccaagagttccgatgcctcaaccgctcagccgccggaatcgcagccactgccggcttcacagacgcctgcctccaaccagccgaaacgacccccagcagcccccgagaacactcctttggttccaagcggggtaaagtcctgggcacaagccagcgtcacccatggagcacatggagatggtggaagggcatcaagcctactgtcacgattctctcgagaggaatttccgaccctgcaggcggctggcgaccaggacaaggctgccaaggaaagggagtctgccgaacagtcgtctgggcccggaccaagcctccgcccccaaaattctacaacttggagggacggaggtgggcgtggccctgatgagctggagggcccggactccaaacttcatcatggtcatgatccccggggtgggctacagccttcaggcccaccccagttccctccctaccgcggaatgatgccgcctttcatgtatcccccatatctcccgttccctccgccctatggaccccaggggccttaccgataccccactcctgatgggcccagccgttttccccgtgtggcgggcccccgaggctcagggccaccaatgcgcttagtagagcctgtgggtcgtccctctattctcaaagaggataatctcaaagagtttgatcagttggatcaggagaatgatgatggttgggcaggggcccatgaagaggttgactacactgaaaagctcaagttcagcgatgaggaagatgggcgagactctgatgaggagggagctgagggccacagggattcccaatcagcttctggtgaggaacggccccctgaagcagatggcaaaaagggcaactcccccaacagcgaaccgcccactcctaagacggcctgggcagaaacctctcggcctccagagacagagccgggacctcctgccccaaagcctcccctacccccacctcaccggggccccgccgggaactggggcccccctggggactacccagatcgtgggggtcctccctgcaagcccccagcacctgaagatgaggatgaggcatggcggcagcgacgaaagcagtcgtcatctgagatttccctggcagtggagcgggcccggcgacggcgagaagaagaggagcggcgcatgcaagaagagcgccgggcagcctgtgctgagaagctcaagcgactcgatgaaaagtttggggcacctgacaagcggctcaaagcagagcctgctgccccacctgctgccccttctaccccagctccaccacctgcagtccctaaagaactccctgcacctccagctccacctccagcatcagccccaacaccagagacagaacctgaagagccagcacaggcccctcctgcccaatctactcctactccaggtgtggctgcggctcccactctggtgagtggtggtggcagtaccagtagcaccagcagtggcagcttcgaagccagcccagtggaaccacaactgccctcaaaagagggtcctgaaccaccagaagaggttcctcctcctaccacacccccagttccaaaggtggaacccaagggtgatgggattggtcccacccgccagccccctagtcagggcttgggctaccccaaatatcagaagtcgttgcctcctcgtttccagcggcagcagcaggagcagctcctgaagcagcagcagcagcaccagtggcagcagcatcaacagggctctgcccctcctaccccagtgcccccatcaccaccacagcctgtgaccctgggggctgtgccagctccacaggctccacccccgccccccaaggccctgtacccaggtgctctgggccggcccccacccatgcccccaatgaactttgatccccgatggatgatgattcctccttatgtggacccccggctcctccagggtcgtccccctctagacttctaccctcctggtgtgcatccctctggcctagttccccgagagcgttcagacagtgggggctcaagctcagagccatttgaccgtcatgcacctgctatgttacgggaacggggcactccaccggtggatccaaagttggcctgggtaggagatgtcttcaccgccacacccgctgaaccccgcccacttacctcacctctgcgccaggctgcggatgaggatgacaaggggatgaggagcgagactcctccagtacctcccccaccaccctatctggccagttatccaggctttcctgagaatggagcccctgggcccccaatctctcgctttcctctggaggaaccagggccccgtccactcccctggcccccaggcagtgatgaagtggccaagatacaaactccaccacccaagaaggagccccctaaggaggagactgcacagctgacggggccagaagcaggccgaaagcctgcccgcggagtcgggagtggaggccagggccccccaccaccacgcagagagagtcgcacagagacccgctggggccctcgtccagggagcagtcgtcgtggaatccctccagaggagccaggggccccaccccgccgggctgggcctataaagaaacctccaccacctacaaaagtagaagagctgcctcccaagcccctcgaacagggggatgaaacccccaaacccccaaagccagacccactcaagataaccaaggggaagctagggggccccaaggagaccccacccaatggaaatctttcccctgccccaaggcttcggagggactattcgtatgaaagagtgggtcctacctcttgccggggtcggggccgaggcgagtattttgccagagggaggggttttcgggggacctatgggggacgagggcggggagcccgaagccgggaattccgcagttaccgagagtttcgaggagatgatgggcgtggaggtgggacagggggaccaaaccaccctcctgctccccgaggccgcactgccagcgagacacggagcgagggttcagagtatgaggaaatccccaagcggcgccggcagcggggctcagaaacaggcagcgagacccatgagagtgatctggctccttcagacaaggaggctcccacacccaaggagggaacactcacccaggtccctctcgctcccccaccaccaggagccccaccttcaccagccccagcccgcttcactgcccggggtgggcgagtcttcactcccagaggggtgccatctcgccggggccgaggaggagggaggccccctcctcaagtttgcccaggctggagccctccagccaagtctctggctcccaagaaacctcccacaggccctttgccaccaagtaaggagcctttgaaagagaagttgatcccagggcctctgtcccctgtggcgcgcggaggcagcaatggaggtagcaatgtgggcatggaagatggggagcgaccccgaaggaggcgacatgggagggctcagcagcaggataaaccgcctcgtttccggaggctgaagcaggaacgggagaatgccgcaagggggtctgagggcaagccctccctaacccttccagcctccgctcctggacctgaggaggccctcacaacagtcacagtggccccagcacctcgccgggcagctgccaagtctcctgatctgtcaaaccagaactcagaccaagccaatgaggaatgggagactgcatcagagagcagtgacttcaccagtgagcgccgaggggacaaagaggcacccccaccagtactgctgacacccaaggctgtgggaactcctgggggaggtggaggtggagccgtaccaggtatttcagccatgtcccgcggagatctgagccagagagccaaggatttgagtaaacggagcttctcaagtcagcggccaggcatggaacggcagaatcggcgccctggcccagggggcaaggctggcagcagtggcagcagcagtggaggaggcggtgggggtcctggaggaaggaccgggccaggacgaggcgacaagaggagctggccctctcccaagaaccgaagtcgtcctccagaggagcgtcccccggggcttcccctgcctcccccacctcccagcagttctgctgtcttccgcctggaccaagttatccacagcaaccctgctggcatccaacaggctctggcccagcttagtagccgtcaagggagtgtaactgcaccagggggtcatccaaggcacaagcctgggcttccccaagcccctcagggcccctctcctaggcccccaacccgatacgagccccagagggtcaacagcggcctcagttctgacccccactttgaggagccggggccaatggtgagaggggtgggtgggactcctcgggactctgccggggttagtccctttccccctaaacgtcgggagcggcctcccagaaaaccagagctgctacaggaggaatctttgccacctcctcatagctctggattcttgggctctaagcctgagggcccaggccctcaggcagagtccagagatacaggcacagaggccctgacccctcacatctggaaccgtttacatactgccactagccgaaagagttaccggcccagctccatggagccttggatggagcccctgagtccttttgaggatgtggctggcacagaaatgagtcagtctgacagtggggtggacctgagtggggattctcaggtgtcatcaggtccctgcagccagcgaagttcccctgatggaggactcaagggggcagcagagggaccccccaagaggcctggaggctcctcacccctgaatgctgttccttgtgagggtccacctggctctgaacctcctaggagaccaccacctgccccccacgatggggacagaaaggagctgccccgggagcagcctctgccccctggccccattggcacagaacgatcacagcgtacagaccgaggcacagagcctggccccattcggccatcccatcgacctggtcccccagtccagtttggcactagtgacaaggactcagacttacgcctagtggtaggagacagcttgaaagcagagaaggagctaacagcatcagtcactgaggccattcctgtatcacgagactgggagctgcttcccagtgctgctgcctctgctgagccacaatccaagaacctggattctgggcactgtgtcccggagcccagctcctcaggccagcgcctgtatcctgaggttttctatggcagtgctgggccttccagttctcagatctctgggggagccatggactctcaattacatccaaacagtggaggcttccgccctgggacaccctcactgcacccttacagatcacagcccctatacctaccccccggcccagcccctccctcagcactgctctctggggtagctctcaagggccagtttctggatttctccacaatgcaagctacagagctggggaagttgccggctggaggagttctctaccctccaccttccttcctctactctccggctttctgccccagtcctttgcctgacacatcgttgcttcaggtacgccaggatctgccatccccttcggatttttattctactcctctgcagcctggtggccaaagtggctttctcccttcaggggctcctgcccagcagatgcttctacccatggtagactcacagctgcctgtggtgaactttggctccctgccgccagcaccacctcctgccccacctcccctttctctgttacctgtgggccctgctctgcagccccccagcctggctgtgcggcccccacctgctcctgctactcgggtgctgccttcacctgccaggcccttccccgctagcttggggcgagcagagctgcatccagtggaactaaagccgttccaggattatcaaaaactgagcagcaaccttgggggacctggatcatcacggactcccccaactggaaggtccttctctggcctcaattcccgtctcaaggccacgccttccacctacagtggagtcttccgcacccagcgcgtcgacctttaccagcaggcctccccaccagatgccctgcgctggatacctaagccttgggagcggacagggccgccacctcgagaagggccctcccgacgggcagaggagcctgggtcccgaggggacaaggagcctgggttgcccccaccccgctgagggagttcctcttgccccctacccccggggcttgtatatagattataaatatataagggggaaaggggtgggcggggaggggttgtggggctggggcctcacttcccctcctcccccttcccctggtcccctgtccctggggctgtttgttaaaaaagagtaataaaaggatttaaaaaaaaaaa

SEQ ID NO: 344930 - DNA, 6873 bp, Artificial Sequence
  derived and/or modified sequence
agggggtgctcccgggggcggcggttgcccggatgggccgttagtcggggctcagccgcggagtgagcgagggagacgggaggagccgaacccggcgccatccgccgccatcctcccccgccccaccgccatcccgtcccggggagcccctaggcccgggtcccggatccccgcgcacccggccaggctctggcacgttttgggggaggtgcctgcaggacccaacatactcaatgagcttccagcgcaatgtccgatcgctcggggccgactgccaagggaaaggatggaaagaagtattcctcgctcaacctgtttgatacgtataagggcaagtccttagagatccagaaacccgctgttgcccctcgccatggcctgcagagtctcgggaaagttgccattgcccggcgtatgccacctccagccaaccttccaagcctgaaagccgagaacaaaggcaatgaccccaatgtctcactagtgccaaaagacggaacaggatgggcaagcaaacaggagcagtccgaccccaagagttccgatgcctcaaccgctcagccgccggaatcgcagccactgccggcttcacagacgcctgcctccaaccagccgaaacgacccccagcagcccccgagaacactcctttggttccaagcggggtaaagtcctgggcacaagccagcgtcacccatggagcacatggagatggtggaagggcatcaagcctactgtcacgattctctcgagaggaatttccgaccctgcaggcggctggcgaccaggacaaggctgccaaggaaagggagtctgccgaacagtcgtctgggcccggaccaagcctccgcccccaaaattctacaacttggagggacggaggtgggcgtggccctgatgagctggagggcccggactccaaacttcatcatggtcatgatccccggggtgggctacagccttcaggcccaccccagttccctccctaccgcggaatgatgccgcctttcatgtatcccccatatctcccgttccctccgccctatggaccccaggggccttaccgataccccactcctgatgggcccagccgttttccccgtgtggcgggcccccgaggctcagggccaccaatgcgcttagtagagcctgtgggtcgtccctctattctcaaagaggataatctcaaagagtttgatcagttggatcaggagaatgatgatggttgggcaggggcccatgaagaggttgactacactgaaaagctcaagttcagcgatgaggaagatgggcgagactctgatgaggagggagctgagggccacagggattcccaatcagcttctggtgaggaacggccccctgaagcagatggcaaaaagggcaactcccccaacagcgaaccgcccactcctaagacggcctgggcagaaacctctcggcctccagagacagagccgggacctcctgccccaaagcctcccctacccccacctcaccggggccccgccgggaactggggcccccctggggactacccagatcgtgggggtcctccctgcaagcccccagcacctgaagatgaggatgaggcatggcggcagcgacgaaagcagtcgtcatctgagatttccctggcagtggagcgggcccggcgacggcgagaagaagaggagcggcgcatgcaagaagagcgccgggcagcctgtgctgagaagctcaagcgactcgatgaaaagtttggggcacctgacaagcggctcaaagcagagcctgctgccccacctgctgccccttctaccccagctccaccacctgcagtccctaaagaactccctgcacctccagctccacctccagcatcagccccaacaccagagacagaacctgaagagccagcacaggcccctcctgcccaatctactcctactccaggtgtggctgcggctcccactctggtgagtggtggtggcagtaccagtagcaccagcagtggcagcttcgaagccagcccagtggaaccacaactgccctcaaaagagggtcctgaaccaccagaagaggttcctcctcctaccacacccccagttccaaaggtggaacccaagggtgatgggattggtcccacccgccagccccctagtcagggcttgggctaccccaaatatcagaagtcgttgcctcctcgtttccagcggcagcagcaggagcagctcctgaagcagcagcagcagcaccagtggcagcagcatcaacagggctctgcccctcctaccccagtgcccccatcaccaccacagcctgtgaccctgggggctgtgccagctccacaggctccacccccgccccccaaggccctgtacccaggtgctctgggccggcccccacccatgcccccaatgaactttgatccccgatggatgatgattcctccttatgtggacccccggctcctccagggtcgtccccctctagacttctaccctcctggtgtgcatccctctggcctagttccccgagagcgttcagacagtgggggctcaagctcagagccatttgaccgtcatgcacctgctatgttacgggaacggggcactccaccggtggatccaaagttggcctgggtaggagatgtcttcaccgccacacccgctgaaccccgcccacttacctcacctctgcgccaggctgcggatgaggatgacaaggggatgaggagcgagactcctccagtacctcccccaccaccctatctggccagttatccaggctttcctgagaatggagcccctgggcccccaatctctcgctttcctctggaggaaccagggccccgtccactcccctggcccccaggcagtgatgaagtggccaagatacaaactccaccacccaagaaggagccccctaaggaggagactgcacagctgacggggccagaagcaggccgaaagcctgcccgcggagtcgggagtggaggccagggccccccaccaccacgcagagagagtcgcacagagacccgctggggccctcgtccagggagcagtcgtcgtggaatccctccagaggagccaggggccccaccccgccgggctgggcctataaagaaacctccaccacctacaaaagtagaagagctgcctcccaagcccctcgaacagggggatgaaacccccaaacccccaaagccagacccactcaagataaccaaggggaagctagggggccccaaggagaccccacccaatggaaatctttcccctgccccaaggcttcggagggactattcgtatgaaagagtgggtcctacctcttgccggggtcggggccgaggcgagtattttgccagagggaggggttttcgggggacctatgggggacgagggcggggagccgccgggaattccgcagttaccgagagtttcgaggagatgatgggcgtggaggtgggacagggggaccaaaccaccctcctgctccccgaggccgcactgccagcgagacacggagcgagggttcagagtatgaggaaatccccaagcggcgccggcagcggggctcagaaacaggcagcgagacccatgagagtgatctggctccttcagacaaggaggctcccacacccaaggagggaacactcacccaggtcccgctcccccaccaccaggagccccaccttcccagccccagcccgcttcactcccggggtgggcgagtcttcactcccagaggggatctcgccggggccgaggaggagggagcctcctcaagtttgcccaggctggagccctccagccaagtctctggctcccaagaaacctcccacaggccctttgccaccaagtaaggagcctttgaaagagaagttgatcccagggcctctgtcccctgtggcgcgcggaggcagcaatggaggtagcaatgtgggcatggaagatggggagcgaccccgaaggaggcgacatgggagggctcagcagcaggataaaccgcctcgtttccggaggctgaagcaggaacgggagaatgccgcaagggggtctgagggcaagccctccctaacccttccagcctccgctcctggacctgaggaggccctcacaacagtcacagtggccccagcacctcgccgggcagctgccaagtctcctgatctgtcaaaccagaactcagaccaagccaatgaggaatgggagactgcatcagagagcagtgacttcaccagtgagcgccgaggggacaaagaggcacccccaccagtactgctgacacccaaggctgtgggaactcctgggggaggtggaggtggagccgtaccaggtatttcagccatgtcccgcggagatctgagccagagagccaaggatttgagtaaacggagcttctcaagtcagcggccaggcatggaacggcagaatcggcgccctggcccagggggcaaggctggcagcagtggcagcagcagtggaggaggcggtgggggtcctggaggaaggaccgggccaggacgaggcgacaagaggagctggccctctcccaagaaccgaagtcgtcctccagaggagcgtcccccggggcttcccctgcctcccccacctcccagcagttctgctgtcttccgcctggaccaagttatccacagcaaccctgctggcatccaacaggctctggcccagcttagtagccgtcaagggagtgtaactgcaccagggggtcatccaaggcacaagcctgggcttccccaagcccctcagggcccctctcctaggcccccaacccgatacgagccccagagggtcaacagcggcctcagttctgacccccactttgaggagccggggccaatggtgagaggggtgggtgggactcctcgggactctgccggggttagtccctttccccctaaacgtcgggagcggcctcccagaaaaccagagctgctacaggaggaatctttgccacctcctcatagctctggattcttgggctctaagcctgagggcccaggccctcaggcagagtccagagatacaggcacagaggccctgacccctcacatctggaaccgtttacatactgccactagccgaaagagttaccggcccagctccatggagccttggatggagcccctgagtccttttgaggatgtggctggcacagaaatgagtcagtctgacagtggggtggacctgagtggggattctcaggtgtcatcaggtccctgcagccagcgaagttcccctgatggaggactcaagggggcagcagagggaccccccaagaggcctggaggctcctcacccctgaatgctgttccttgtgagggtccacctggctctgaacctcctaggagaccaccacctgccccccacgatggggacagaaaggagctgccccgggagcagcctctgccccctggccccattggcacagaacgatcacagcgtacagaccgaggcacagagcctggccccattcggccatcccatcgacctggtcccccagtccagtttggcactagtgacaaggactcagacttacgcctagtggtaggagacagcttgaaagcagagaaggagctaacagcatcagtcactgaggccattcctgtatcacgagactgggagctgcttcccagtgctgctgcctctgctgagccacaatccaagaacctggattctgggcactgtgtcccggagcccagctcctcaggccagcgcctgtatcctgaggttttctatggcagtgctgggccttccagttctcagatctctgggggacatggactctcaattacatccaaacagtggaggcgccctgggacaccctcactgcacccttacagatcacagcccctatacctaccccccggcccagcccctccctcagcactgctctctggggtagctctcaagggccagtttctggatttctccacaatgcaagctacagagctggggaagttgccggctggaggagttctctaccctccaccttccttcctctactctccggctttctgccccagtcctttgcctgacacatcgttgcttcaggtacgccaggatctgccatccccttcggatttttattctactcctctgcagcctggtggccaaagtggctttctcccttcaggggctcctgcccagcagatgcttctacccatggtagactcacagctgcctgtggtgaactttggctccctgccgccagcaccacctcctgccccacctcccctttctctgttacctgtgggccctgctctgcagccccccagcctggctgtgcggcccccacctgctcctgctactcgggtgctgccttcacctgccaggcccttccccgctagcttggggcgagcagagctgcatccagtggaactaaagccgttccaggattatcaaaaactgagcagcaaccttgggggacctggatcatcacggactcccccaactggaaggtccttctctggcctcaattcccgtctcaaggccacgccttccacctacagtggagtcttccgcacccagcgcgtcgacctttaccagcaggcctccccaccagatgccctgcgctggatacctaagccttgggagcggacagggccgccacctcgagaagggccctcccgacgggcagaggagcctgggtcccgaggggacaaggagcctgggttgcccccaccccgctgagggagttcctcttgccccctacccccggggcttgtatatagattataaatatataagggggaaaggggtgggcggggaggggttgtggggctggggcctcacttcccctcctcccccttcccctggtcccctgtccctggggctgtttgttaaaaaagagtaataaaaggattt

SEQ ID NO: 344931 - DNA, 6840 bp, Artificial Sequence
  derived and/or modified sequence
agggggtgctcccgggggcggcggttgcccggatgggccgttagtcggggctcagccgcggagtgagcgagggagacgggaggagccgaacccggcgccatccgccgccatcctcccccgccccaccgccatcccgtcccggggagcccctaggcccgggtcccggatccccgcgcacccggccaggctctggcacgttttgggggaggtgcctgcaggacccaacatactcaatgagcttccagcgcaatgtccgatcgctcggggccgactgccaagggaaaggatggaaagaagtattcctcgctcaacctgtttgatacgtataagggcaagtccttagagatccagaaacccgctgttgcccctcgccatggcctgcagagtctcgggaaagttgccattgcccggcgtatgccacctccagccaaccttccaagcctgaaagccgagaacaaaggcaatgaccccaatgtctcactagtgccaaaagacggaacaggatgggcaagcaaacaggagcagtccgaccccaagagttccgatgcctcaaccgctcagccgccggaatcgcagccactgccggcttcacagacgcctgcctccaaccagccgaaacgacccccagcagcccccgagaacactcctttggttccaagcggggtaaagtcctgggcacaagccagcgtcacccatggagcacatggagatggtggaagggcatcaagcctactgtcacgattctctcgagaggaatttccgaccctgcaggcggctggcgaccaggacaaggctgccaaggaaagggagtctgccgaacagtcgtctgggcccggaccaagcctccgcccccaaaattctacaacttggagggacggaggtgggcgtggccctgatgagctggagggcccggactccaaacttcatcatggtcatgatccccggggtgggctacagccttcaggcccaccccagttccctccctaccgcggaatgatgccgcctttcatgtatcccccatatctcccgttccctccgccctatggaccccaggggccttaccgataccccactcctgatgggcccagccgttttccccgtgtggcgggcccccgaggctcagggccaccaatgcgcttagtagagcctgtgggtcgtccctctattctcaaagaggataatctcaaagagtttgatcagttggatcaggagaatgatgatggttgggcaggggcccatgaagaggttgactacactgaaaagctcaagttcagcgatgaggaagatgggcgagactctgatgaggagggagctgagggccacagggattcccaatcagcttctggtgaggaacggccccctgaagcagatggcaaaaagggcaactcccccaacagcgaaccgcccactcctaagacggcctgggcagaaacctctcggcctccagagacagagccgggacctcctgccccaaagcctcccctacccccccctggggactacccagatcgtgggggtcctccctgcaagcccccagcacctgaagatgaggatgaggcatggcggcagcgacgaaagcagtcgtcatctgagatttccctggcagtggagcgggcccggcgacggcgagaagaagaggagcggcgcatgcaagaagagcgccgggcagcctgtgctgagaagctcaagcgactcgatgaaaagtttggggcacctgacaagcggctcaaagcagagcctgctgccccacctgctgccccttctaccccagctccaccacctgcagtccctaaagaactccctgcacctccagctccacctccagcatcagccccaacaccagagacagaacctgaagagccagcacaggcccctcctgcccaatctactcctactccaggtgtggctgcggctcccactctggtgagtggtggtggcagtaccagtagcaccagcagtggcagcttcgaagccagcccagtggaaccacaactgccctcaaaagagggtcctgaaccaccagaagaggttcctcctcctaccacacccccagttccaaaggtggaacccaagggtgatgggattggtcccacccgccagccccctagtcagggcttgggctaccccaaatatcagaagtcgttgcctcctcgtttccagcggcagcagcaggagcagctcctgaagcagcagcagcagcaccagtggcagcagcatcaacagggctctgcccctcctaccccagtgcccccatcaccaccacagcctgtgaccctgggggctgtgccagctccacaggctccacccccgccccccaaggccctgtacccaggtgctctgggccggcccccacccatgcccccaatgaactttgatccccgatggatgatgattcctccttatgtggacccccggctcctccagggtcgtccccctctagacttctaccctcctggtgtgcatccctctggcctagttccccgagagcgttcagacagtgggggctcaagctcagagccatttgaccgtcatgcacctgctatgttacgggaacggggcactccaccggtggatccaaagttggcctgggtaggagatgtcttcaccgccacacccgctgaaccccgcccacttacctcacctctgcgccaggctgcggatgaggatgacaaggggatgaggagcgagactcctccagtacctcccccaccaccctatctggccagttatccaggctttcctgagaatggagcccctgggcccccaatctctcgctttcctctggaggaaccagggccccgtccactcccctggcccccaggcagtgatgaagtggccaagatacaaactccaccacccaagaaggagccccctaaggaggagactgcacagctgacggggccagaagcaggccgaaagcctgcccgcggagtcgggagtggaggccagggccccccaccaccacgcagagagagtcgcacagagacccgctggggccctcgtccagggagcagtcgtcgtggaatccctccagaggagccaggggccccaccccgccgggctgggcctataaagaaacctccaccacctacaaaagtagaagagctgcctcccaagcccctcgaacagggggatgaaacccccaaacccccaaagccagacccactcaagataaccaaggggaagctagggggccccaaggagaccccacccaatggaaatctttcccctgccccaaggcttcggagggactattcgtatgaaagagtgggtcctacctcttgccggggtcggggccgaggcgagtattttgccagagggaggggttttcgggggacctatgggggacgagggcggggagccgccgggaattccgcagttaccgagagtttcgaggagatgatgggcgtggaggtgggacagggggaccaaaccaccctcctgctccccgaggccgcactgccagcgagacacggagcgagggttcagagtatgaggaaatccccaagcggcgccggcagcggggctcagaaacaggcagcgagacccatgagagtgatctggctccttcagacaaggaggctcccacacccaaggagggaacactcacccaggtcccgctcccccaccaccaggagccccaccttcccagccccagcccgcttcactcccggggtgggcgagtcttcactcccagaggggatctcgccggggccgaggaggagggagcctcctcaagtttgcccaggctggagccctccagccaagtctctggctcccaagaaacctcccacaggccctttgccaccaagtaaggagcctttgaaagagaagttgatcccagggcctctgtcccctgtggcgcgcggaggcagcaatggaggtagcaatgtgggcatggaagatggggagcgaccccgaaggaggcgacatgggagggctcagcagcaggataaaccgcctcgtttccggaggctgaagcaggaacgggagaatgccgcaagggggtctgagggcaagccctccctaacccttccagcctccgctcctggacctgaggaggccctcacaacagtcacagtggccccagcacctcgccgggcagctgccaagtctcctgatctgtcaaaccagaactcagaccaagccaatgaggaatgggagactgcatcagagagcagtgacttcaccagtgagcgccgaggggacaaagaggcacccccaccagtactgctgacacccaaggctgtgggaactcctgggggaggtggaggtggagccgtaccaggtatttcagccatgtcccgcggagatctgagccagagagccaaggatttgagtaaacggagcttctcaagtcagcggccaggcatggaacggcagaatcggcgccctggcccagggggcaaggctggcagcagtggcagcagcagtggaggaggcggtgggggtcctggaggaaggaccgggccaggacgaggcgacaagaggagctggccctctcccaagaaccgaagtcgtcctccagaggagcgtcccccggggcttcccctgcctcccccacctcccagcagttctgctgtcttccgcctggaccaagttatccacagcaaccctgctggcatccaacaggctctggcccagcttagtagccgtcaagggagtgtaactgcaccagggggtcatccaaggcacaagcctgggcttccccaagcccctcagggcccctctcctaggcccccaacccgatacgagccccagagggtcaacagcggcctcagttctgacccccactttgaggagccggggccaatggtgagaggggtgggtgggactcctcgggactctgccggggttagtccctttccccctaaacgtcgggagcggcctcccagaaaaccagagctgctacaggaggaatctttgccacctcctcatagctctggattcttgggctctaagcctgagggcccaggccctcaggcagagtccagagatacaggcacagaggccctgacccctcacatctggaaccgtttacatactgccactagccgaaagagttaccggcccagctccatggagccttggatggagcccctgagtccttttgaggatgtggctggcacagaaatgagtcagtctgacagtggggtggacctgagtggggattctcaggtgtcatcaggtccctgcagccagcgaagttcccctgatggaggactcaagggggcagcagagggaccccccaagaggcctggaggctcctcacccctgaatgctgttccttgtgagggtccacctggctctgaacctcctaggagaccaccacctgccccccacgatggggacagaaaggagctgccccgggagcagcctctgccccctggccccattggcacagaacgatcacagcgtacagaccgaggcacagagcctggccccattcggccatcccatcgacctggtcccccagtccagtttggcactagtgacaaggactcagacttacgcctagtggtaggagacagcttgaaagcagagaaggagctaacagcatcagtcactgaggccattcctgtatcacgagactgggagctgcttcccagtgctgctgcctctgctgagccacaatccaagaacctggattctgggcactgtgtcccggagcccagctcctcaggccagcgcctgtatcctgaggttttctatggcagtgctgggccttccagttctcagatctctgggggacatggactctcaattacatccaaacagtggaggcgccctgggacaccctcactgcacccttacagatcacagcccctatacctaccccccggcccagcccctccctcagcactgctctctggggtagctctcaagggccagtttctggatttctccacaatgcaagctacagagctggggaagttgccggctggaggagttctctaccctccaccttccttcctctactctccggctttctgccccagtcctttgcctgacacatcgttgcttcaggtacgccaggatctgccatccccttcggatttttattctactcctctgcagcctggtggccaaagtggctttctcccttcaggggctcctgcccagcagatgcttctacccatggtagactcacagctgcctgtggtgaactttggctccctgccgccagcaccacctcctgccccacctcccctttctctgttacctgtgggccctgctctgcagccccccagcctggctgtgcggcccccacctgctcctgctactcgggtgctgccttcacctgccaggcccttccccgctagcttggggcgagcagagctgcatccagtggaactaaagccgttccaggattatcaaaaactgagcagcaaccttgggggacctggatcatcacggactcccccaactggaaggtccttctctggcctcaattcccgtctcaaggccacgccttccacctacagtggagtcttccgcacccagcgcgtcgacctttaccagcaggcctccccaccagatgccctgcgctggatacctaagccttgggagcggacagggccgccacctcgagaagggccctcccgacgggcagaggagcctgggtcccgaggggacaaggagcctgggttgcccccaccccgctgagggagttcctcttgccccctacccccggggcttgtatatagattataaatatataagggggaaaggggtgggcggggaggggttgtggggctggggcctcacttcccctcctcccccttcccctggtcccctgtccctggggctgtttgttaaaaaagagtaataaaaggattt

SEQ ID NO: 344932 - DNA, 4303 bp, Artificial Sequence
  derived and/or modified sequence
ttcttcaggcctagttccccgagagcgttcagacagtgggggctcaagctcagagccatttgaccgtcatgcacctgctatgttacgggaacggggcactccaccggtggatccaaagttggcctgggtaggagatgtcttcaccgccacacccgctgaaccccgcccacttacctcacctctgcgccaggctgcggatgaggatgacaaggggatgaggagcgagactcctccagtacctcccccaccaccctatctggccagttatccaggctttcctgagaatggagcccctgggcccccaatctctcgctttcctctggaggaaccagggccccgtccactcccctggcccccaggcagtgatgaagtggccaagatacaaactccaccacccaagaaggagccccctaaggaggagactgcacagctgacggggccagaagcaggccgaaagcctgcccgcggagtcgggagtggaggccagggccccccaccaccacgcagagagagtcgcacagagacccgctggggccctcgtccagggagcagtcgtcgtggaatccctccagaggagccaggggccccaccccgccgggctgggcctataaagaaacctccaccacctacaaaagtagaagagctgcctcccaagcccctcgaacagggggatgaaacccccaaacccccaaagccagacccactcaagataaccaaggggaagctagggggccccaaggagaccccacccaatggaaatctttcccctgccccaaggcttcggagggactattcgtatgaaagagtgggtcctacctcttgccggggtcggggccgaggcgagtattttgccagagggaggggttttcgggggacctatgggggacgagggcggggagcccgaagccgggaattccgcagttaccgagagtttcgaggagatgatgggcgtggaggtgggacagggggaccaaaccaccctcctgctccccgaggccgcactgccagcgagacacggagcgagggttcagagtatgaggaaatccccaagcggcgccggcagcggggctcagaaacaggcagcgagacccatgagagtgatctggctccttcagacaaggaggctcccacacccaaggagggaacactcacccaggtccctctcgctcccccaccaccaggagccccaccttcaccagccccagcccgcttcactgcccggggtgggcgagtcttcactcccagaggggtgccatctcgccggggccgaggaggagggaggccccctcctcaagtttgcccaggctggagccctccagccaagtctctggctcccaagaaacctcccacaggccctttgccaccaagtaaggagcctttgaaagagaagttgatcccagggcctctgtcccctgtggcgcgcggaggcagcaatggaggtagcaatgtgggcatggaagatggggagcgaccccgaaggaggcgacatgggagggctcagcagcaggataaaccgcctcgtttccggaggctgaagcaggaacgggagaatgccgcaagggggtctgagggcaagccctccctaacccttccagcctccgctcctggacctgaggaggccctcacaacagtcacagtggccccagcacctcgccgggcagctgccaagtctcctgatctgtcaaaccagaactcagaccaagccaatgaggaatgggagactgcatcagagagcagtgacttcaccagtgagcgccgaggggacaaagaggcacccccaccagtactgctgacacccaaggctgtgggaactcctgggggaggtggaggtggagccgtaccaggtatttcagccatgtcccgcggagatctgagccagagagccaaggatttgagtaaacggagcttctcaagtcagcggccaggcatggaacggcagaatcggcgccctggcccagggggcaaggctggcagcagtggcagcagcagtggaggaggcggtgggggtcctggaggaaggaccgggccaggacgaggcgacaagaggagctggccctctcccaagaaccgaagtcgtcctccagaggagcgtcccccggggcttcccctgcctcccccacctcccagcagttctgctgtcttccgcctggaccaagttatccacagcaaccctgctggcatccaacaggctctggcccagcttagtagccgtcaagggagtgtaactgcaccagggggtcatccaaggcacaagcctgggcttccccaagcccctcagggcccctctcctaggcccccaacccgatacgagccccagagggtcaacagcggcctcagttctgacccccactttgaggagccggggccaatggtgagaggggtgggtgggactcctcgggactctgccggggttagtccctttccccctaaacgtcgggagcggcctcccagaaaaccagagctgctacaggaggaatctttgccacctcctcatagctctggattcttgggctctaagcctgagggcccaggccctcaggcagagtccagagatacaggcacagaggccctgacccctcacatctggaaccgtttacatactgccactagccgaaagagttaccggcccagctccatggagccttggatggagcccctgagtccttttgaggatgtggctggcacagaaatgagtcagtctgacagtggggtggacctgagtggggattctcaggtgtcatcaggtccctgcagccagcgaagttcccctgatggaggactcaagggggcagcagagggaccccccaagaggcctggaggctcctcacccctgaatgctgttccttgtgagggtccacctggctctgaacctcctaggagaccaccacctgccccccacgatggggacagaaaggagctgccccgggagcagcctctgccccctggccccattggcacagaacgatcacagcgtacagaccgaggcacagagcctggccccattcggccatcccatcgacctggtcccccagtccagtttggcactagtgacaaggactcagacttacgcctagtggtaggagacagcttgaaagcagagaaggagctaacagcatcagtcactgaggccattcctgtatcacgagactgggagctgcttcccagtgctgctgcctctgctgagccacaatccaagaacctggattctgggcactgtgtcccggagcccagctcctcaggccagcgcctgtatcctgaggttttctatggcagtgctgggccttccagttctcagatctctgggggagccatggactctcaattacatccaaacagtggaggcttccgccctgggacaccctcactgcacccttacagatcacagcccctatacctaccccccggcccagcccctccctcagcactgctctctggggtagctctcaagggccagtttctggatttctccacaatgcaagctacagagctggggaagttgccggctggaggagttctctaccctccaccttccttcctctactctccggctttctgccccagtcctttgcctgacacatcgttgcttcaggtacgccaggatctgccatccccttcggatttttattctactcctctgcagcctggtggccaaagtggctttctcccttcaggggctcctgcccagcagatgcttctacccatggtagactcacagctgcctgtggtgaactttggctccctgccgccagcaccacctcctgccccacctcccctttctctgttacctgtgggccctgctctgcagccccccagcctggctgtgcggcccccacctgctcctgctactcgggtgctgccttcacctgccaggcccttccccgctagcttggggcgagcagagctgcatccagtggaactaaagccgttccaggattatcaaaaactgagcagcaaccttgggggacctggatcatcacggactcccccaactggaaggtccttctctggcctcaattcccgtctcaaggccacgccttccacctacagtggagtcttccgcacccagcgcgtcgacctttaccagcaggcctccccaccagatgccctgcgctggatacctaagccttgggagcggacagggccgccacctcgagaagggccctcccgacgggcagaggagcctgggtcccgaggggacaaggagcctgggttgcccccaccccgctgagggagttcctcctcccccttcccctggtcccctgtccctggggctgtttgttaaaaaagagtaataaaaggattt

SEQ ID NO: 344933 - DNA, 6474 bp, Artificial Sequence
  derived and/or modified sequence
atgagcgacagaagcggccccaccgccaagggcaaggacggcaagaagtacagcagcctgaacctgttcgacacctacaagggcaagagcctggagatccagaagcccgccgtggcccccagacacggcctgcagagcctgggcaaggtggccatcgccagaagaatgcccccccccgccaacctgcccagcctgaaggccgagaacaagggcaacgaccccaacgtgagcctggtgcccaaggacggcaccggctgggccagcaagcaggagcagagcgaccccaagagcagcgacgccagcaccgcccagccccccgagagccagcccctgcccgccagccagacccccgccagcaaccagcccaagagaccccccgccgcccccgagaacacccccctggtgcccagcggcgtgaagagctgggcccaggccagcgtgacccacggcgcccacggcgacggcggcagagccagcagcctgctgagcagattcagcagagaggagttccccaccctgcaggccgccggcgaccaggacaaggccgccaaggagagagagagcgccgagcagagcagcggccccggccccagcctgagaccccagaacagcaccacctggagagacggcggcggcagaggccccgacgagctggagggccccgacagcaagctgcaccacggccacgaccccagaggcggcctgcagcccagcggccccccccagttccccccctacagaggcatgatgccccccttcatgtaccccccctacctgcccttcccccccccctacggcccccagggcccctacagataccccacccccgacggccccagcagattccccagagtggccggccccagaggcagcggcccccccatgagactggtggagcccgtgggcagacccagcatcctgaaggaggacaacctgaaggagttcgaccagctggaccaggagaacgacgacggctgggccggcgcccacgaggaggtggactacaccgagaagctgaagttcagcgacgaggaggacggcagagacagcgacgaggagggcgccgagggccacagagacagccagagcgccagcggcgaggagagaccccccgaggccgacggcaagaagggcaacagccccaacagcgagccccccacccccaagaccgcctgggccgagaccagcagaccccccgagaccgagcccggcccccccgcccccaagccccccctgccccccccccacagaggccccgccggcaactggggcccccccggcgactaccccgacagaggcggccccccctgcaagccccccgcccccgaggacgaggacgaggcctggagacagagaagaaagcagagcagcagcgagatcagcctggccgtggagagagccagaagaagaagagaggaggaggagagaagaatgcaggaggagagaagagccgcctgcgccgagaagctgaagagactggacgagaagttcggcgcccccgacaagagactgaaggccgagcccgccgccccccccgccgcccccagcacccccgcccccccccccgccgtgcccaaggagctgcccgccccccccgcccccccccccgccagcgcccccacccccgagaccgagcccgaggagcccgcccaggccccccccgcccagagcacccccacccccggcgtggccgccgcccccaccctggtgagcggcggcggcagcaccagcagcaccagcagcggcagcttcgaggccagccccgtggagccccagctgcccagcaaggagggccccgagccccccgaggaggtgcccccccccaccaccccccccgtgcccaaggtggagcccaagggcgacggcatcggccccaccagacagccccccagccagggcctgggctaccccaagtaccagaagagcctgccccccagattccagagacagcagcaggagcagctgctgaagcagcagcagcagcaccagtggcagcagcaccagcagggcagcgccccccccacccccgtgccccccagccccccccagcccgtgaccctgggcgccgtgcccgccccccaggcccccccccccccccccaaggccctgtaccccggcgccctgggcagacccccccccatgccccccatgaacttcgaccccagatggatgatgatccccccctacgtggaccccagactgctgcagggcagaccccccctggacttctacccccccggcgtgcaccccagcggcctggtgcccagagagagaagcgacagcggcggcagcagcagcgagcccttcgacagacacgcccccgccatgctgagagagagaggcaccccccccgtggaccccaagctggcctgggtgggcgacgtgttcaccgccacccccgccgagcccagacccctgaccagccccctgagacaggccgccgacgaggacgacaagggcatgagaagcgagaccccccccgtgccccccccccccccctacctggccagctaccccggcttccccgagaacggcgcccccggcccccccatcagcagattccccctggaggagcccggccccagacccctgccctggccccccggcagcgacgaggtggccaagatccagacccccccccccaagaaggagccccccaaggaggagaccgcccagctgaccggccccgaggccggcagaaagcccgccagaggcgtgggcagcggcggccagggcccccccccccccagaagagagagcagaaccgagaccagatggggccccagacccggcagcagcagaagaggcatcccccccgaggagcccggcgccccccccagaagagccggccccatcaagaagccccccccccccaccaaggtggaggagctgccccccaagcccctggagcagggcgacgagacccccaagccccccaagcccgaccccctgaagatcaccaagggcaagctgggcggccccaaggagaccccccccaacggcaacctgagccccgcccccagactgagaagagactacagctacgagagagtgggccccaccagctgcagaggcagaggcagaggcgagtacttcgccagaggcagaggcttcagaggcacctacggcggcagaggcagaggcgccagaagcagagagttcagaagctacagagagttcagaggcgacgacggcagaggcggcggcaccggcggccccaaccacccccccgcccccagaggcagaaccgccagcgagaccagaagcgagggcagcgagtacgaggagatccccaagagaagaagacagagaggcagcgagaccggcagcgagacccacgagagcgacctggcccccagcgacaaggaggcccccacccccaaggagggcaccctgacccaggtgcccctggccccccccccccccggcgccccccccagccccgcccccgccagattcaccgccagaggcggcagagtgttcacccccagaggcgtgcccagcagaagaggcagaggcggcggcagaccccccccccaggtgtgccccggctggagcccccccgccaagagcctggcccccaagaagccccccaccggccccctgccccccagcaaggagcccctgaaggagaagctgatccccggccccctgagccccgtggccagaggcggcagcaacggcggcagcaacgtgggcatggaggacggcgagagacccagaagaagaagacacggcagagcccagcagcaggacaagccccccagattcagaagactgaagcaggagagagagaacgccgccagaggcagcgagggcaagcccagcctgaccctgcccgccagcgcccccggccccgaggaggccctgaccaccgtgaccgtggcccccgcccccagaagagccgccgccaagagccccgacctgagcaaccagaacagcgaccaggccaacgaggagtgggagaccgccagcgagagcagcgacttcaccagcgagagaagaggcgacaaggaggcccccccccccgtgctgctgacccccaaggccgtgggcacccccggcggcggcggcggcggcgccgtgcccggcatcagcgccatgagcagaggcgacctgagccagagagccaaggacctgagcaagagaagcttcagcagccagagacccggcatggagagacagaacagaagacccggccccggcggcaaggccggcagcagcggcagcagcagcggcggcggcggcggcggccccggcggcagaaccggccccggcagaggcgacaagagaagctggcccagccccaagaacagaagcagaccccccgaggagagaccccccggcctgcccctgcccccccccccccccagcagcagcgccgtgttcagactggaccaggtgatccacagcaaccccgccggcatccagcaggccctggcccagctgagcagcagacagggcagcgtgaccgcccccggcggccaccccagacacaagcccggcctgccccaggccccccagggccccagccccagaccccccaccagatacgagccccagagagtgaacagcggcctgagcagcgacccccacttcgaggagcccggccccatggtgagaggcgtgggcggcacccccagagacagcgccggcgtgagccccttcccccccaagagaagagagagaccccccagaaagcccgagctgctgcaggaggagagcctgccccccccccacagcagcggcttcctgggcagcaagcccgagggccccggcccccaggccgagagcagagacaccggcaccgaggccctgaccccccacatctggaacagactgcacaccgccaccagcagaaagagctacagacccagcagcatggagccctggatggagcccctgagccccttcgaggacgtggccggcaccgagatgagccagagcgacagcggcgtggacctgagcggcgacagccaggtgagcagcggcccctgcagccagagaagcagccccgacggcggcctgaagggcgccgccgagggcccccccaagagacccggcggcagcagccccctgaacgccgtgccctgcgagggcccccccggcagcgagccccccagaagacccccccccgccccccacgacggcgacagaaaggagctgcccagagagcagcccctgccccccggccccatcggcaccgagagaagccagagaaccgacagaggcaccgagcccggccccatcagacccagccacagacccggcccccccgtgcagttcggcaccagcgacaaggacagcgacctgagactggtggtgggcgacagcctgaaggccgagaaggagctgaccgccagcgtgaccgaggccatccccgtgagcagagactgggagctgctgcccagcgccgccgccagcgccgagccccagagcaagaacctggacagcggccactgcgtgcccgagcccagcagcagcggccagagactgtaccccgaggtgttctacggcagcgccggccccagcagcagccagatcagcggcggcgccatggacagccagctgcaccccaacagcggcggcttcagacccggcacccccagcctgcacccctacagaagccagcccctgtacctgccccccggccccgccccccccagcgccctgctgagcggcgtggccctgaagggccagttcctggacttcagcaccatgcaggccaccgagctgggcaagctgcccgccggcggcgtgctgtaccccccccccagcttcctgtacagccccgccttctgccccagccccctgcccgacaccagcctgctgcaggtgagacaggacctgcccagccccagcgacttctacagcacccccctgcagcccggcggccagagcggcttcctgcccagcggcgcccccgcccagcagatgctgctgcccatggtggacagccagctgcccgtggtgaacttcggcagcctgccccccgcccccccccccgcccccccccccctgagcctgctgcccgtgggccccgccctgcagccccccagcctggccgtgagacccccccccgcccccgccaccagagtgctgcccagccccgccagacccttccccgccagcctgggcagagccgagctgcaccccgtggagctgaagcccttccaggactaccagaagctgagcagcaacctgggcggccccggcagcagcagaaccccccccaccggcagaagcttcagcggcctgaacagcagactgaaggccacccccagcacctacagcggcgtgttcagaacccagagagtggacctgtaccagcaggccagcccccccgacgccctgagatggatccccaagccctgggagagaaccggccccccccccagagagggccccagcagaagagccgaggagcccggcagcagaggcgacaaggagcccggcctgcccccccccagatag

SEQ ID NO: 344934 - DNA, 6450 bp, Artificial Sequence
  derived and/or modified sequence
atgagcgacagaagcggccccaccgccaagggcaaggacggcaagaagtacagcagcctgaacctgttcgacacctacaagggcaagagcctggagatccagaagcccgccgtggcccccagacacggcctgcagagcctgggcaaggtggccatcgccagaagaatgcccccccccgccaacctgcccagcctgaaggccgagaacaagggcaacgaccccaacgtgagcctggtgcccaaggacggcaccggctgggccagcaagcaggagcagagcgaccccaagagcagcgacgccagcaccgcccagccccccgagagccagcccctgcccgccagccagacccccgccagcaaccagcccaagagaccccccgccgcccccgagaacacccccctggtgcccagcggcgtgaagagctgggcccaggccagcgtgacccacggcgcccacggcgacggcggcagagccagcagcctgctgagcagattcagcagagaggagttccccaccctgcaggccgccggcgaccaggacaaggccgccaaggagagagagagcgccgagcagagcagcggccccggccccagcctgagaccccagaacagcaccacctggagagacggcggcggcagaggccccgacgagctggagggccccgacagcaagctgcaccacggccacgaccccagaggcggcctgcagcccagcggccccccccagttccccccctacagaggcatgatgccccccttcatgtaccccccctacctgcccttcccccccccctacggcccccagggcccctacagataccccacccccgacggccccagcagattccccagagtggccggccccagaggcagcggcccccccatgagactggtggagcccgtgggcagacccagcatcctgaaggaggacaacctgaaggagttcgaccagctggaccaggagaacgacgacggctgggccggcgcccacgaggaggtggactacaccgagaagctgaagttcagcgacgaggaggacggcagagacagcgacgaggagggcgccgagggccacagagacagccagagcgccagcggcgaggagagaccccccgaggccgacggcaagaagggcaacagccccaacagcgagccccccacccccaagaccgcctgggccgagaccagcagaccccccgagaccgagcccggcccccccgcccccaagccccccctgccccccccccacagaggccccgccggcaactggggcccccccggcgactaccccgacagaggcggccccccctgcaagccccccgcccccgaggacgaggacgaggcctggagacagagaagaaagcagagcagcagcgagatcagcctggccgtggagagagccagaagaagaagagaggaggaggagagaagaatgcaggaggagagaagagccgcctgcgccgagaagctgaagagactggacgagaagttcggcgcccccgacaagagactgaaggccgagcccgccgccccccccgccgcccccagcacccccgcccccccccccgccgtgcccaaggagctgcccgccccccccgcccccccccccgccagcgcccccacccccgagaccgagcccgaggagcccgcccaggccccccccgcccagagcacccccacccccggcgtggccgccgcccccaccctggtgagcggcggcggcagcaccagcagcaccagcagcggcagcttcgaggccagccccgtggagccccagctgcccagcaaggagggccccgagccccccgaggaggtgcccccccccaccaccccccccgtgcccaaggtggagcccaagggcgacggcatcggccccaccagacagccccccagccagggcctgggctaccccaagtaccagaagagcctgccccccagattccagagacagcagcaggagcagctgctgaagcagcagcagcagcaccagtggcagcagcaccagcagggcagcgccccccccacccccgtgccccccagccccccccagcccgtgaccctgggcgccgtgcccgccccccaggcccccccccccccccccaaggccctgtaccccggcgccctgggcagacccccccccatgccccccatgaacttcgaccccagatggatgatgatccccccctacgtggaccccagactgctgcagggcagaccccccctggacttctacccccccggcgtgcaccccagcggcctggtgcccagagagagaagcgacagcggcggcagcagcagcgagcccttcgacagacacgcccccgccatgctgagagagagaggcaccccccccgtggaccccaagctggcctgggtgggcgacgtgttcaccgccacccccgccgagcccagacccctgaccagccccctgagacaggccgccgacgaggacgacaagggcatgagaagcgagaccccccccgtgccccccccccccccctacctggccagctaccccggcttccccgagaacggcgcccccggcccccccatcagcagattccccctggaggagcccggccccagacccctgccctggccccccggcagcgacgaggtggccaagatccagacccccccccccaagaaggagccccccaaggaggagaccgcccagctgaccggccccgaggccggcagaaagcccgccagaggcgtgggcagcggcggccagggcccccccccccccagaagagagagcagaaccgagaccagatggggccccagacccggcagcagcagaagaggcatcccccccgaggagcccggcgccccccccagaagagccggccccatcaagaagccccccccccccaccaaggtggaggagctgccccccaagcccctggagcagggcgacgagacccccaagccccccaagcccgaccccctgaagatcaccaagggcaagctgggcggccccaaggagaccccccccaacggcaacctgagccccgcccccagactgagaagagactacagctacgagagagtgggccccaccagctgcagaggcagaggcagaggcgagtacttcgccagaggcagaggcttcagaggcacctacggcggcagaggcagaggcgccgccggcaacagcgccgtgaccgagagcttcgaggagatgatgggcgtggaggtgggccagggcgaccagaccaccctgctgctgcccgaggccgccctgcccgccagacacggcgccagagtgcagagcatgagaaagagccccagcggcgccggcagcggcgcccagaagcaggccgccagacccatgagagtgatctggctgctgcagaccagaagactgccccaccccagaagagagcacagccccagaagcagaagccccaccaccagaagccccaccttccccgcccccgccagattcacccccggcgtgggcgagagcagcctgcccgagggcatcagccccggccccagaagaagagagcccccccaggtgtgccccggctggagcccccccgccaagagcctggcccccaagaagccccccaccggccccctgccccccagcaaggagcccctgaaggagaagctgatccccggccccctgagccccgtggccagaggcggcagcaacggcggcagcaacgtgggcatggaggacggcgagagacccagaagaagaagacacggcagagcccagcagcaggacaagccccccagattcagaagactgaagcaggagagagagaacgccgccagaggcagcgagggcaagcccagcctgaccctgcccgccagcgcccccggccccgaggaggccctgaccaccgtgaccgtggcccccgcccccagaagagccgccgccaagagccccgacctgagcaaccagaacagcgaccaggccaacgaggagtgggagaccgccagcgagagcagcgacttcaccagcgagagaagaggcgacaaggaggcccccccccccgtgctgctgacccccaaggccgtgggcacccccggcggcggcggcggcggcgccgtgcccggcatcagcgccatgagcagaggcgacctgagccagagagccaaggacctgagcaagagaagcttcagcagccagagacccggcatggagagacagaacagaagacccggccccggcggcaaggccggcagcagcggcagcagcagcggcggcggcggcggcggccccggcggcagaaccggccccggcagaggcgacaagagaagctggcccagccccaagaacagaagcagaccccccgaggagagaccccccggcctgcccctgcccccccccccccccagcagcagcgccgtgttcagactggaccaggtgatccacagcaaccccgccggcatccagcaggccctggcccagctgagcagcagacagggcagcgtgaccgcccccggcggccaccccagacacaagcccggcctgccccaggccccccagggccccagccccagaccccccaccagatacgagccccagagagtgaacagcggcctgagcagcgacccccacttcgaggagcccggccccatggtgagaggcgtgggcggcacccccagagacagcgccggcgtgagccccttcccccccaagagaagagagagaccccccagaaagcccgagctgctgcaggaggagagcctgccccccccccacagcagcggcttcctgggcagcaagcccgagggccccggcccccaggccgagagcagagacaccggcaccgaggccctgaccccccacatctggaacagactgcacaccgccaccagcagaaagagctacagacccagcagcatggagccctggatggagcccctgagccccttcgaggacgtggccggcaccgagatgagccagagcgacagcggcgtggacctgagcggcgacagccaggtgagcagcggcccctgcagccagagaagcagccccgacggcggcctgaagggcgccgccgagggcccccccaagagacccggcggcagcagccccctgaacgccgtgccctgcgagggcccccccggcagcgagccccccagaagacccccccccgccccccacgacggcgacagaaaggagctgcccagagagcagcccctgccccccggccccatcggcaccgagagaagccagagaaccgacagaggcaccgagcccggccccatcagacccagccacagacccggcccccccgtgcagttcggcaccagcgacaaggacagcgacctgagactggtggtgggcgacagcctgaaggccgagaaggagctgaccgccagcgtgaccgaggccatccccgtgagcagagactgggagctgctgcccagcgccgccgccagcgccgagccccagagcaagaacctggacagcggccactgcgtgcccgagcccagcagcagcggccagagactgtaccccgaggtgttctacggcagcgccggccccagcagcagccagatcagcggcggccacggcctgagcatcaccagcaagcagtggagaagacccggcacccccagcctgcacccctacagaagccagcccctgtacctgccccccggccccgccccccccagcgccctgctgagcggcgtggccctgaagggccagttcctggacttcagcaccatgcaggccaccgagctgggcaagctgcccgccggcggcgtgctgtaccccccccccagcttcctgtacagccccgccttctgccccagccccctgcccgacaccagcctgctgcaggtgagacaggacctgcccagccccagcgacttctacagcacccccctgcagcccggcggccagagcggcttcctgcccagcggcgcccccgcccagcagatgctgctgcccatggtggacagccagctgcccgtggtgaacttcggcagcctgccccccgcccccccccccgcccccccccccctgagcctgctgcccgtgggccccgccctgcagccccccagcctggccgtgagacccccccccgcccccgccaccagagtgctgcccagccccgccagacccttccccgccagcctgggcagagccgagctgcaccccgtggagctgaagcccttccaggactaccagaagctgagcagcaacctgggcggccccggcagcagcagaaccccccccaccggcagaagcttcagcggcctgaacagcagactgaaggccacccccagcacctacagcggcgtgttcagaacccagagagtggacctgtaccagcaggccagcccccccgacgccctgagatggatccccaagccctgggagagaaccggccccccccccagagagggccccagcagaagagccgaggagcccggcagcagaggcgacaaggagcccggcctgcccccccccagatag

SEQ ID NO: 344935 - DNA, 6417 bp, Artificial Sequence
  derived and/or modified sequence
atgagcgacagaagcggccccaccgccaagggcaaggacggcaagaagtacagcagcctgaacctgttcgacacctacaagggcaagagcctggagatccagaagcccgccgtggcccccagacacggcctgcagagcctgggcaaggtggccatcgccagaagaatgcccccccccgccaacctgcccagcctgaaggccgagaacaagggcaacgaccccaacgtgagcctggtgcccaaggacggcaccggctgggccagcaagcaggagcagagcgaccccaagagcagcgacgccagcaccgcccagccccccgagagccagcccctgcccgccagccagacccccgccagcaaccagcccaagagaccccccgccgcccccgagaacacccccctggtgcccagcggcgtgaagagctgggcccaggccagcgtgacccacggcgcccacggcgacggcggcagagccagcagcctgctgagcagattcagcagagaggagttccccaccctgcaggccgccggcgaccaggacaaggccgccaaggagagagagagcgccgagcagagcagcggccccggccccagcctgagaccccagaacagcaccacctggagagacggcggcggcagaggccccgacgagctggagggccccgacagcaagctgcaccacggccacgaccccagaggcggcctgcagcccagcggccccccccagttccccccctacagaggcatgatgccccccttcatgtaccccccctacctgcccttcccccccccctacggcccccagggcccctacagataccccacccccgacggccccagcagattccccagagtggccggccccagaggcagcggcccccccatgagactggtggagcccgtgggcagacccagcatcctgaaggaggacaacctgaaggagttcgaccagctggaccaggagaacgacgacggctgggccggcgcccacgaggaggtggactacaccgagaagctgaagttcagcgacgaggaggacggcagagacagcgacgaggagggcgccgagggccacagagacagccagagcgccagcggcgaggagagaccccccgaggccgacggcaagaagggcaacagccccaacagcgagccccccacccccaagaccgcctgggccgagaccagcagaccccccgagaccgagcccggcccccccgcccccaagccccccctgcccccccccggcgactaccccgacagaggcggccccccctgcaagccccccgcccccgaggacgaggacgaggcctggagacagagaagaaagcagagcagcagcgagatcagcctggccgtggagagagccagaagaagaagagaggaggaggagagaagaatgcaggaggagagaagagccgcctgcgccgagaagctgaagagactggacgagaagttcggcgcccccgacaagagactgaaggccgagcccgccgccccccccgccgcccccagcacccccgcccccccccccgccgtgcccaaggagctgcccgccccccccgcccccccccccgccagcgcccccacccccgagaccgagcccgaggagcccgcccaggccccccccgcccagagcacccccacccccggcgtggccgccgcccccaccctggtgagcggcggcggcagcaccagcagcaccagcagcggcagcttcgaggccagccccgtggagccccagctgcccagcaaggagggccccgagccccccgaggaggtgcccccccccaccaccccccccgtgcccaaggtggagcccaagggcgacggcatcggccccaccagacagccccccagccagggcctgggctaccccaagtaccagaagagcctgccccccagattccagagacagcagcaggagcagctgctgaagcagcagcagcagcaccagtggcagcagcaccagcagggcagcgccccccccacccccgtgccccccagccccccccagcccgtgaccctgggcgccgtgcccgccccccaggcccccccccccccccccaaggccctgtaccccggcgccctgggcagacccccccccatgccccccatgaacttcgaccccagatggatgatgatccccccctacgtggaccccagactgctgcagggcagaccccccctggacttctacccccccggcgtgcaccccagcggcctggtgcccagagagagaagcgacagcggcggcagcagcagcgagcccttcgacagacacgcccccgccatgctgagagagagaggcaccccccccgtggaccccaagctggcctgggtgggcgacgtgttcaccgccacccccgccgagcccagacccctgaccagccccctgagacaggccgccgacgaggacgacaagggcatgagaagcgagaccccccccgtgccccccccccccccctacctggccagctaccccggcttccccgagaacggcgcccccggcccccccatcagcagattccccctggaggagcccggccccagacccctgccctggccccccggcagcgacgaggtggccaagatccagacccccccccccaagaaggagccccccaaggaggagaccgcccagctgaccggccccgaggccggcagaaagcccgccagaggcgtgggcagcggcggccagggcccccccccccccagaagagagagcagaaccgagaccagatggggccccagacccggcagcagcagaagaggcatcccccccgaggagcccggcgccccccccagaagagccggccccatcaagaagccccccccccccaccaaggtggaggagctgccccccaagcccctggagcagggcgacgagacccccaagccccccaagcccgaccccctgaagatcaccaagggcaagctgggcggccccaaggagaccccccccaacggcaacctgagccccgcccccagactgagaagagactacagctacgagagagtgggccccaccagctgcagaggcagaggcagaggcgagtacttcgccagaggcagaggcttcagaggcacctacggcggcagaggcagaggcgccgccggcaacagcgccgtgaccgagagcttcgaggagatgatgggcgtggaggtgggccagggcgaccagaccaccctgctgctgcccgaggccgccctgcccgccagacacggcgccagagtgcagagcatgagaaagagccccagcggcgccggcagcggcgcccagaagcaggccgccagacccatgagagtgatctggctgctgcagaccagaagactgccccaccccagaagagagcacagccccagaagcagaagccccaccaccagaagccccaccttccccgcccccgccagattcacccccggcgtgggcgagagcagcctgcccgagggcatcagccccggccccagaagaagagagcccccccaggtgtgccccggctggagcccccccgccaagagcctggcccccaagaagccccccaccggccccctgccccccagcaaggagcccctgaaggagaagctgatccccggccccctgagccccgtggccagaggcggcagcaacggcggcagcaacgtgggcatggaggacggcgagagacccagaagaagaagacacggcagagcccagcagcaggacaagccccccagattcagaagactgaagcaggagagagagaacgccgccagaggcagcgagggcaagcccagcctgaccctgcccgccagcgcccccggccccgaggaggccctgaccaccgtgaccgtggcccccgcccccagaagagccgccgccaagagccccgacctgagcaaccagaacagcgaccaggccaacgaggagtgggagaccgccagcgagagcagcgacttcaccagcgagagaagaggcgacaaggaggcccccccccccgtgctgctgacccccaaggccgtgggcacccccggcggcggcggcggcggcgccgtgcccggcatcagcgccatgagcagaggcgacctgagccagagagccaaggacctgagcaagagaagcttcagcagccagagacccggcatggagagacagaacagaagacccggccccggcggcaaggccggcagcagcggcagcagcagcggcggcggcggcggcggccccggcggcagaaccggccccggcagaggcgacaagagaagctggcccagccccaagaacagaagcagaccccccgaggagagaccccccggcctgcccctgcccccccccccccccagcagcagcgccgtgttcagactggaccaggtgatccacagcaaccccgccggcatccagcaggccctggcccagctgagcagcagacagggcagcgtgaccgcccccggcggccaccccagacacaagcccggcctgccccaggccccccagggccccagccccagaccccccaccagatacgagccccagagagtgaacagcggcctgagcagcgacccccacttcgaggagcccggccccatggtgagaggcgtgggcggcacccccagagacagcgccggcgtgagccccttcccccccaagagaagagagagaccccccagaaagcccgagctgctgcaggaggagagcctgccccccccccacagcagcggcttcctgggcagcaagcccgagggccccggcccccaggccgagagcagagacaccggcaccgaggccctgaccccccacatctggaacagactgcacaccgccaccagcagaaagagctacagacccagcagcatggagccctggatggagcccctgagccccttcgaggacgtggccggcaccgagatgagccagagcgacagcggcgtggacctgagcggcgacagccaggtgagcagcggcccctgcagccagagaagcagccccgacggcggcctgaagggcgccgccgagggcccccccaagagacccggcggcagcagccccctgaacgccgtgccctgcgagggcccccccggcagcgagccccccagaagacccccccccgccccccacgacggcgacagaaaggagctgcccagagagcagcccctgccccccggccccatcggcaccgagagaagccagagaaccgacagaggcaccgagcccggccccatcagacccagccacagacccggcccccccgtgcagttcggcaccagcgacaaggacagcgacctgagactggtggtgggcgacagcctgaaggccgagaaggagctgaccgccagcgtgaccgaggccatccccgtgagcagagactgggagctgctgcccagcgccgccgccagcgccgagccccagagcaagaacctggacagcggccactgcgtgcccgagcccagcagcagcggccagagactgtaccccgaggtgttctacggcagcgccggccccagcagcagccagatcagcggcggccacggcctgagcatcaccagcaagcagtggagaagacccggcacccccagcctgcacccctacagaagccagcccctgtacctgccccccggccccgccccccccagcgccctgctgagcggcgtggccctgaagggccagttcctggacttcagcaccatgcaggccaccgagctgggcaagctgcccgccggcggcgtgctgtaccccccccccagcttcctgtacagccccgccttctgccccagccccctgcccgacaccagcctgctgcaggtgagacaggacctgcccagccccagcgacttctacagcacccccctgcagcccggcggccagagcggcttcctgcccagcggcgcccccgcccagcagatgctgctgcccatggtggacagccagctgcccgtggtgaacttcggcagcctgccccccgcccccccccccgcccccccccccctgagcctgctgcccgtgggccccgccctgcagccccccagcctggccgtgagacccccccccgcccccgccaccagagtgctgcccagccccgccagacccttccccgccagcctgggcagagccgagctgcaccccgtggagctgaagcccttccaggactaccagaagctgagcagcaacctgggcggccccggcagcagcagaaccccccccaccggcagaagcttcagcggcctgaacagcagactgaaggccacccccagcacctacagcggcgtgttcagaacccagagagtggacctgtaccagcaggccagcccccccgacgccctgagatggatccccaagccctgggagagaaccggccccccccccagagagggccccagcagaagagccgaggagcccggcagcagaggcgacaaggagcccggcctgcccccccccagatag

SEQ ID NO: 344936 - DNA, 4149 bp, Artificial Sequence
  derived and/or modified sequence
atgctgagagagagaggcaccccccccgtggaccccaagctggcctgggtgggcgacgtgttcaccgccacccccgccgagcccagacccctgaccagccccctgagacaggccgccgacgaggacgacaagggcatgagaagcgagaccccccccgtgccccccccccccccctacctggccagctaccccggcttccccgagaacggcgcccccggcccccccatcagcagattccccctggaggagcccggccccagacccctgccctggccccccggcagcgacgaggtggccaagatccagacccccccccccaagaaggagccccccaaggaggagaccgcccagctgaccggccccgaggccggcagaaagcccgccagaggcgtgggcagcggcggccagggcccccccccccccagaagagagagcagaaccgagaccagatggggccccagacccggcagcagcagaagaggcatcccccccgaggagcccggcgccccccccagaagagccggccccatcaagaagccccccccccccaccaaggtggaggagctgccccccaagcccctggagcagggcgacgagacccccaagccccccaagcccgaccccctgaagatcaccaagggcaagctgggcggccccaaggagaccccccccaacggcaacctgagccccgcccccagactgagaagagactacagctacgagagagtgggccccaccagctgcagaggcagaggcagaggcgagtacttcgccagaggcagaggcttcagaggcacctacggcggcagaggcagaggcgccagaagcagagagttcagaagctacagagagttcagaggcgacgacggcagaggcggcggcaccggcggccccaaccacccccccgcccccagaggcagaaccgccagcgagaccagaagcgagggcagcgagtacgaggagatccccaagagaagaagacagagaggcagcgagaccggcagcgagacccacgagagcgacctggcccccagcgacaaggaggcccccacccccaaggagggcaccctgacccaggtgcccctggccccccccccccccggcgccccccccagccccgcccccgccagattcaccgccagaggcggcagagtgttcacccccagaggcgtgcccagcagaagaggcagaggcggcggcagaccccccccccaggtgtgccccggctggagcccccccgccaagagcctggcccccaagaagccccccaccggccccctgccccccagcaaggagcccctgaaggagaagctgatccccggccccctgagccccgtggccagaggcggcagcaacggcggcagcaacgtgggcatggaggacggcgagagacccagaagaagaagacacggcagagcccagcagcaggacaagccccccagattcagaagactgaagcaggagagagagaacgccgccagaggcagcgagggcaagcccagcctgaccctgcccgccagcgcccccggccccgaggaggccctgaccaccgtgaccgtggcccccgcccccagaagagccgccgccaagagccccgacctgagcaaccagaacagcgaccaggccaacgaggagtgggagaccgccagcgagagcagcgacttcaccagcgagagaagaggcgacaaggaggcccccccccccgtgctgctgacccccaaggccgtgggcacccccggcggcggcggcggcggcgccgtgcccggcatcagcgccatgagcagaggcgacctgagccagagagccaaggacctgagcaagagaagcttcagcagccagagacccggcatggagagacagaacagaagacccggccccggcggcaaggccggcagcagcggcagcagcagcggcggcggcggcggcggccccggcggcagaaccggccccggcagaggcgacaagagaagctggcccagccccaagaacagaagcagaccccccgaggagagaccccccggcctgcccctgcccccccccccccccagcagcagcgccgtgttcagactggaccaggtgatccacagcaaccccgccggcatccagcaggccctggcccagctgagcagcagacagggcagcgtgaccgcccccggcggccaccccagacacaagcccggcctgccccaggccccccagggccccagccccagaccccccaccagatacgagccccagagagtgaacagcggcctgagcagcgacccccacttcgaggagcccggccccatggtgagaggcgtgggcggcacccccagagacagcgccggcgtgagccccttcccccccaagagaagagagagaccccccagaaagcccgagctgctgcaggaggagagcctgccccccccccacagcagcggcttcctgggcagcaagcccgagggccccggcccccaggccgagagcagagacaccggcaccgaggccctgaccccccacatctggaacagactgcacaccgccaccagcagaaagagctacagacccagcagcatggagccctggatggagcccctgagccccttcgaggacgtggccggcaccgagatgagccagagcgacagcggcgtggacctgagcggcgacagccaggtgagcagcggcccctgcagccagagaagcagccccgacggcggcctgaagggcgccgccgagggcccccccaagagacccggcggcagcagccccctgaacgccgtgccctgcgagggcccccccggcagcgagccccccagaagacccccccccgccccccacgacggcgacagaaaggagctgcccagagagcagcccctgccccccggccccatcggcaccgagagaagccagagaaccgacagaggcaccgagcccggccccatcagacccagccacagacccggcccccccgtgcagttcggcaccagcgacaaggacagcgacctgagactggtggtgggcgacagcctgaaggccgagaaggagctgaccgccagcgtgaccgaggccatccccgtgagcagagactgggagctgctgcccagcgccgccgccagcgccgagccccagagcaagaacctggacagcggccactgcgtgcccgagcccagcagcagcggccagagactgtaccccgaggtgttctacggcagcgccggccccagcagcagccagatcagcggcggcgccatggacagccagctgcaccccaacagcggcggcttcagacccggcacccccagcctgcacccctacagaagccagcccctgtacctgccccccggccccgccccccccagcgccctgctgagcggcgtggccctgaagggccagttcctggacttcagcaccatgcaggccaccgagctgggcaagctgcccgccggcggcgtgctgtaccccccccccagcttcctgtacagccccgccttctgccccagccccctgcccgacaccagcctgctgcaggtgagacaggacctgcccagccccagcgacttctacagcacccccctgcagcccggcggccagagcggcttcctgcccagcggcgcccccgcccagcagatgctgctgcccatggtggacagccagctgcccgtggtgaacttcggcagcctgccccccgcccccccccccgcccccccccccctgagcctgctgcccgtgggccccgccctgcagccccccagcctggccgtgagacccccccccgcccccgccaccagagtgctgcccagccccgccagacccttccccgccagcctgggcagagccgagctgcaccccgtggagctgaagcccttccaggactaccagaagctgagcagcaacctgggcggccccggcagcagcagaaccccccccaccggcagaagcttcagcggcctgaacagcagactgaaggccacccccagcacctacagcggcgtgttcagaacccagagagtggacctgtaccagcaggccagcccccccgacgccctgagatggatccccaagccctgggagagaaccggccccccccccagagagggccccagcagaagagccgaggagcccggcagcagaggcgacaaggagcccggcctgcccccccccagatag

SEQ ID NO: 344937 - protein, 162 aa, Artificial Sequence
  derived and/or modified sequence
MEDTQAIDWDVEEEEETEQSSESLRCNVEPVGRLHIFSGAHGPEKDFPLHLGKNVVGRMPDCSVALPFPSISKQHAEIEILAWDKAPILRDCGSLNGTQILRPPKVLSPGVSHRLRDQELILFADLLCQYHRLDVSLPFVSRGPLTVEETPRVQGETQPQRL

SEQ ID NO: 344938 - protein, 127 aa, Artificial Sequence
  derived and/or modified sequence
MEDTQAIDWDVEEEEETEQSSESLRCNVEPVGRLHIFSGAHGPEKDFPLHLGKNVVGRMPDCSVALPFPSISKQHAEIEILAWDKAPILRDCGSLNGTQILRPPKVLSPGVSHRLRDQELILFADLL

SEQ ID NO: 344939 - protein, 306 aa, Artificial Sequence
  derived and/or modified sequence
  misc_feature (1)..(1): Xaa can be any naturally occurring amino acid
XHVGGTKDSEDNYGDSEDLDLQATQCFLENQGLEAVQSMEDEPTQAFMLTPPQELGPSHCSFQTTGLLNCKMPPAEKASRIRAAEKVSRGDQESPDACLPPTVPEAPAPPQKPLNSQSQKHLAPPPLLSPLLPSIKPTVRKTRQDGSQEAPEAPLSSELEPFHPKPKIRTRKSSRMTPFPATSAAPEPHPSTSTAQPVTPKPTSQATRSRTNRSSVKTPEPVVPTAPELQPSTSTDQPVTSEPTSQVTRGRKSRSSVKTPETVVPTALELQPSTSTDRPVTSEPTSQATRGRKNRSSVKTPEPVVP

SEQ ID NO: 344940 - protein, 113 aa, Artificial Sequence
  derived and/or modified sequence
MEDTQAIDWDVEEEEETEQSSESLRCNVEPVGRLHIFSGAHGPEKDFPLHLGKNVVGRMPDCSVALPFPSISKQHAEIEILAWDKAPILRDCGSLNGTQILRPPKVLSPGVSH

SEQ ID NO: 344941 - protein, 221 aa, Artificial Sequence
  derived and/or modified sequence
MEDTQAIDWDVEEEEETEQSSESLRCNVEPVGRLHIFSGAHGPEKDFPLHLGKNVVGRMPDCSVALPFPSISKQHAEIEILAWDKAPILRDCGSLNGTQILSSSLPPPQTSLLPLSLRLRLLGEEQIDPLSRLLKQLSPQPLSYRLPPPQTSLSPLSPHLGPLGEEKIGPLSRPLKQLCPQPLSSSLPPPQTNLSPLSPHLGPLGAGQIGPLSRPLNQLSL

SEQ ID NO: 344942 - protein, 245 aa, Artificial Sequence
  derived and/or modified sequence
MEDTQAIDWDVEEEEETEQSSESLRCNVEPVGRLHIFSGAHGPEKDFPLHLGKNVVGRMPDCSVALPFPSISKQHAEIEILAWDKAPILRDCGSLNGTQILRPPKVLSPGVSHRLRDQELILFADLLCQYHRLDVSLPFVSRGPLTVEETPRVQGETQPQRLLLAEDSEEEVDFLSERRMVKKSRTTSSSVIVPESDEEGHSPVLGGLGPPFAFNLNSDTDVEEGQQPATEEASSAARRGATVEA

SEQ ID NO: 344943 - protein, 244 aa, Artificial Sequence
  derived and/or modified sequence
MEDTQAIDWDVEEEEETEQSSESLRCNVEPVGRLHIFSGAHGPEKDFPLHLGKNVVGRMPDCSVALPFPSISKQHAEIEILAWDKAPILRDCGSLNGTQILRPPKVLSPGVSHRLRDQELILFADLLCQYHRLDVSLPFVSRGPLTVEETPRVQGETQPQRLLLAEDSEEEVDFLSERRMVKKSRTTSSSVIVPESDEEGHSPVLGGLGPPFAFNLNSDTDVEEGQQPHRGGLLSCQKRCHCRG

SEQ ID NO: 344944 - protein, 1825 aa, Artificial Sequence
  derived and/or modified sequence
MEDTQAIDWDVEEEEETEQSSESLRCNVEPVGRLHIFSGAHGPEKDFPLHLGKNVVGRMPDCSVALPFPSISKQHAEIEILAWDKAPILRDCGSLNGTQILRPPKVLSPGVSHRLRDQELILFADLLCQYHRLDVSLPFVSRGPLTVEETPRVQGETQPQRLLLAEDSEEEVDFLSERRMVKKSRTTSSSVIVPESDEEGHSPVLGGLGPPFAFNLNSDTDVEEGQQPATEEASSAARRGATVEAKQSEAEVVTEIQLEKDQPLVKEKDNDTKVKRGAGNGVVPAGVILERSQPPGEDSDTDVDDDSRPPGRPAEVHLERAQPFGFIDSDTDAEEERIPATPVVIPMKKRKIFHGVGTRGPGAPGLAHLQESQAGSDTDVEEGKAPQAVPLEKSQASMVINSDTDDEEEVSAALTLAHLKESQPAIWNRDAEEDMPQRVVLLQRSQTTTERDSDTDVEEEELPVENREAVLKDHTKIRALVRAHSEKDQPPFGDSDDSVEADKSSPGIHLERSQASTTVDINTQVEKEVPPGSAIIHIKKHQVSVEGTNQTDVKAVGGPAKLLVVSLEEAWPLHGDCETDAEEGTSLTASVVADVRKSQLPAEGDAGAEWAAAVLKQERAHEVGAQGGPPVAQVEQDLPISRENLTDLVVDTDTLGESTQPQREGAQVPTGREREQHVGGTKDSEDNYGDSEDLDLQATQCFLENQGLEAVQSMEDEPTQAFMLTPPQELGPSHCSFQTTGLLNCKMPPAEKASRIRAAEKVSRGDQESPDACLPPTVPEAPAPPQKPLNSQSQKHLAPPPLLSPLLPSIKPTVRKTRQDGSQEAPEAPLSSELEPFHPKPKIRTRKSSRMTPFPATSAAPEPHPSTSTAQPVTPKPTSQATRSRTNRSSVKTPEPVVPTAPELQPSTSTDQPVTSEPTSQVTRGRKSRSSVKTPETVVPTALELQPSTSTDRPVTSEPTSQATRGRKNRSSVKTPEPVVPTAPELQPSTSTDQPVTSEPTYQATRGRKNRSSVKTPEPVVPTAPELRPSTSTDRPVTPKPTSRTTRSRTNMSSVKTPETVVPTAPELQISTSTDQPVTPKPTSRTTRSRTNMSSVKNPESTVPIAPELPPSTSTEQPVTPEPTSRATRGRKNRSSGKTPETLVPTAPKLEPSTSTDQPVTPEPTSQATRGRTNRSSVKTPETVVPTAPELQPSTSTDQPVTPEPTSQATRGRTDRSSVKTPETVVPTAPELQASASTDQPVTSEPTSRTTRGRKNRSSVKTPETVVPAAPELQPSTSTDQPVTPEPTSRATRGRTNRSSVKTPESIVPIAPELQPSTSRNQLVTPEPTSRATRCRTNRSSVKTPEPVVPTAPEPHPTTSTDQPVTPKLTSRATRRKTNRSSVKTPKPVEPAASDLEPFTPTDQSVTPEAIAQGGQSKTLRSSTVRAMPVPTTPEFQSPVTTDQPISPEPITQPSCIKRQRAAGNPGSLAAPIDHKPCSAPLEPKSQASRNQRWGAVRAAESLTAIPEPASPQLLETPIHASQIQKVEPAGRSRFTPELQPKASQSRKRSLATMDSPPHQKQPQRGEVSQKTVIIKEEEEDTAEKPGKEEDVVTPKPGKRKRDQAEEEPNRIPSRSLRRTKLNQESTAPKVLFTGVVDARGERAVLALGGSLAGSAAEASHLVTDRIRRTVKFLCALGRGIPILSLDWLHQSRKAGFFLPPDEYVVTDPEQEKNFGFSLQDALSRARERRLLEGYEIYVTPGVQPPPPQMGEIISCCGGTYLPSMPRSYKPQRVVITCPQDFPHCSIPLRVGLPLLSPEFLLTGVLKQEAKPEAFVLSPLEMSST

SEQ ID NO: 344945 - protein, 1825 aa, Artificial Sequence
  derived and/or modified sequence
MEDTQAIDWDVEEEEETEQSSESLRCNVEPVGRLHIFSGAHGPEKDFPLHLGKNVVGRMPDCSVALPFPSISKQHAEIEILAWDKAPILRDCGSLNGTQILRPPKVLSPGVSHRLRDQELILFADLLCQYHRLDVSLPFVSRGPLTVEETPRVQGETQPQRLLLAEDSEEEVDFLSERRMVKKSRTTSSSVIVPESDEEGHSPVLGGLGPPFAFNLNSDTDVEEGQQPATEEASSAARRGATVEAKQSEAEVVTEIQLEKDQPLVKERDNDTKVKRGAGNGVVPAGVILERSQPPGEDSDTDVDDDSRPPGRPAEVHLERAQPFGFIDSDTDAEEERIPATPVVIPMKKRKIFHGVGTRGPGAPGLAHLQESQAGSDTDVEEGKAPQAVPLEKSQASMVINSDTDDEEEVSAALTLAHLKESQPAIWNRDAEEDMPQRVVLLQRSQTTTERDSDTDVEEEELPVENREAVLKDHTKIRALVRAHSEKDQPPFGDSDDSVEADKSSPGIHLERSQASTTVDINTQVEKEVPPGSAIIHIKKHQVSVEGTNQTDVKAVGGPAKLLVVSLEEAWPLHGDCETDAEEGTSLTASVVADVRKSQLPAEGDAGAEWAAAVLKQERAHEVGAQGGPPVAQVEQDLPISRENLTDLVVDTDTLGESTQPQREGAQVPTGREREQHVGGTKDSEDNYGDSEDLDLQATQCFLENQGLEAVQSMEDEPTQAFMLTPPQELGPSHCSFQTTGLLNCKMPPAEKASRIRAAEKVSRGDQESPDACLPPTVPEAPAPPQKPLNSQSQKHLAPPPLLSPLLPSIKPTVRKTRQDGSQEAPEAPLSSELEPFHPKPKIRTRKSSRMTPFPATSAAPEPHPSTSTAQPVTPKPTSQATRSRTNRSSVKTPEPVVPTAPELQPSTSTDQPVTSEPTSQVTRGRKSRSSVKTPETVVPTALELQPSTSTDRPVTSEPTSQATRGRKNRSSVKTPEPVVPTAPELQPSTSTDQPVTSEPTYQATRGRKNRSSVKTPEPVVPTAPELRPSTSTDRPVTPKPTSRTTRSRTNMSSVKTPETVVPTAPELQISTSTDQPVTPKPTSRTTRSRTNMSSVKNPESTVPIAPELPPSTSTEQPVTPEPTSRATRGRKNRSSGKTPETLVPTAPKLEPSTSTDQPVTPEPTSQATRGRTNRSSVKTPETVVPTAPELQPSTSTDQPVTPEPTSQATRGRTDRSSVKTPETVVPTAPELQASASTDQPVTSEPTSRTTRGRKNRSSVKTPETVVPAAPELQPSTSTDQPVTPEPTSRATRGRTNRSSVKTPESIVPIAPELQPSTSRNQLVTPEPTSRATRCRTNRSSVKTPEPVVPTAPEPHPTTSTDQPVTPKLTSRATRRKTNRSSVKTPKPVEPAASDLEPFTPTDQSVTPEAIAQGGQSKTLRSSTVRAMPVPTTPEFQSPVTTDQPISPEPITQPSCIKRQRAAGNPGSLAAPIDHKPCSAPLEPKSQASRNQRWGAVRAAESLTAIPEPASPQLLETPIHASQIQKVEPAGRSRFTPELQPKASQSRKRSLATMDSPPHQKQPQRGEVSQKTVIIKEEEEDTAEKPGKEEDVVTPKPGKRKRDQAEEEPNRIPSRSLRRTKLNQESTAPKVLFTGVVDARGERAVLALGGSLAGSAAEASHLVTDRIRRTVKFLCALGRGIPILSLDWLHQSRKAGFFLPPDEYVVTDPEQEKNFGFSLQDALSRARERRLLEGYEIYVTPGVQPPPPQMGEIISCCGGTYLPSMPRSYKPQRVVITCPQDFPHCSIPLRVGLPLLSPEFLLTGVLKQEAKPEAFVLSPLEMSST

SEQ ID NO: 344946 - protein, 221 aa, Artificial Sequence
  derived and/or modified sequence
MEDTQAIDWDVEEEEETEQSSESLRCNVEPVGRLHIFSGAHGPEKDFPLHLGKNVVGRMPDCSVALPFPSISKQHAEIEILAWDKAPILRDCGSLNGTQILSSSLPPPQTSLLPLSLRLRLLGEEQIDPLSRLLKQLSPQPLSYRLPPPQTSLSPLSPHLGPLGEEKIGPLSRPLKQLCPQPLRSSLPPPQTNLSPLSPHLGPLGAGQIGPLSRPLNQLSL

SEQ ID NO: 344947 - protein, 1654 aa, Artificial Sequence
  derived and/or modified sequence
YHRLDVSLPFVSRGPLTVEETPRVQGETQPQRLLLAEDSEEEVDFLSERRMVKKSRTTSSSVIVPESDEEGHSPVLGGLGPPFAFNLNSDTDVEEGQQPATEEASSAARRGATVEAKQSEAEVVTEIQLEKDQPLVKERDNDTKVKRGAGNGVVPAGVILERSQPPGEDSDTDVDDDSRPPGRPAEVHLERAQPFGFIDSDTDAEEERIPATPVVIPMKKRKIFHGVGTRGPGAPGLAHLQESQAGSDTDVEEGKAPQAVPLEKSQASMVINSDTDDEEEVSAALTLAHLKESQPAIWNRDAEEDMPQRVVLLQRSQTTTERDSDTDVEEEELPVENREAVLKDHTKIRALVRAHSEKDQPPFGDSDDSVEADKSSPGIHLERSQASTTVDINTQVEKEVPPGSAIIHIKKHQVSVEGTNQTDVKAVGGPAKLLVVSLEEAWPLHGDCETDAEEGTSLTASVVADVRKSQLPAEGDAGAEWAAAVLKQERAHEVGAQGGPPVAQVEQDLPISRENLTDLVVDTDTLGESTQPQREGAQVPTGREREQHVGGTKDSEDNYGDSEDLDLQATQCFLENQGLEVQSMEDEPTQAFMLTPPQELGPSHCSFQTTGLLNCKMPPAEKASRIRAAEKVSRGDQESPDACLPPTVPEAPAPPQKPLNSQSQKHLAPPPLLSPLLPSIKPTVRKTRQDGSQEAPEAPLSSELEPFHPKPKIRTRKSSRMTPFPATSAAPEPHPSTSTAQPVTPKPTSQATRSRTNRSSVKTPEPVVPTAPELQPSTSTDQPVTSEPTSQVTRGRKSRSSVKTPETVVPTALELQPSTSTDRPVTSEPTSQATRGRKNRSSVKTPEPVVPTAPELQPSTSTDQPVTSEPTYQATRGRKNRSSVKTPEPVVPTAPELRPSTSTDRPVTPKPTSRTTRSRTNMSSVKNPESTVPIAPELPPSTSTEQPVTPEPTSRATRGRKNRSSGKTPETLVPTAPKLEPSTSTDQPVTPEPTSQATRGRTNRSSVKTPETVVPTAPELQPSTSTDQPVTPEPTSQATRGRTDRSSVKTPETVVPTAPELQASASTDQPVTSEPTSRTTRGRKNRSSVKTPETVVPAAPELQPSTSTDQPVTPEPTSRATRGRTNRSSVKTPESIVPIAPELQPSTSRNQLVTPEPTSRATRCRTNRSSVKTPEPVVPTAPEPHPTTSTDQPVTPKLTSRATRRKTNRSSVKTPKPVEPAASDLEPFTPTDQSVTPEAIAQGGQSKTLRSSTVRAMPVPTTPEFQSPVTTDQPISPEPITQPSCIKRQRAAGNPGSLAAPIDHKPCSAPLEPKSQASRNQRWGAVRAAESLTAIPEPASPQLLETPIHASQIQKVEPAGRSRFTPELQPKASQSRKRSLATMDSPPHQKQPQRGEVSQKTVIIKEEEEDTAEKPGKEEDVVTPKPGKRKRDQAEEEPNRIPSRSLRRTKLNQESTAPKVLFTGVVDARGERAVLALGGSLAGSAAEASHLVTDRIRRTVKFLCALGRGIPILSLDWLHQSRKAGFFLPPDEYVVTDPEQEKNFGFSLQDALSRARERRLLEGYEIYVTPGVQPPPPQMGEIISCCGGTYLPSMPRSYKPQRVVITCPQDFPHCSIPLRVGLPLLSPEFLLTGVLKQEAKPEAFVLSPLEMSST

SEQ ID NO: 344948 - DNA, 921 bp, Artificial Sequence
  derived and/or modified sequence
tgacacgtgggcggcaccaaggacagcgaggacaactacggcgacagcgaggacctggacctgcaggccacccagtgcttcctggagaaccagggcctggaggccgtgcagagcatggaggacgagcccacccaggccttcatgctgacccccccccaggagctgggccccagccactgcagcttccagaccaccggcctgctgaactgcaagatgccccccgccgagaaggccagcagaatcagagccgccgagaaggtgagcagaggcgaccaggagagccccgacgcctgcctgccccccaccgtgcccgaggcccccgcccccccccagaagcccctgaacagccagagccagaagcacctggcccccccccccctgctgagccccctgctgcccagcatcaagcccaccgtgagaaagaccagacaggacggcagccaggaggcccccgaggcccccctgagcagcgagctggagcccttccaccccaagcccaagatcagaaccagaaagagcagcagaatgacccccttccccgccaccagcgccgcccccgagccccaccccagcaccagcaccgcccagcccgtgacccccaagcccaccagccaggccaccagaagcagaaccaacagaagcagcgtgaagacccccgagcccgtggtgcccaccgcccccgagctgcagcccagcaccagcaccgaccagcccgtgaccagcgagcccaccagccaggtgaccagaggcagaaagagcagaagcagcgtgaagacccccgagaccgtggtgcccaccgccctggagctgcagcccagcaccagcaccgacagacccgtgaccagcgagcccaccagccaggccaccagaggcagaaagaacagaagcagcgtgaagacccccgagcccgtggtgccctag

SEQ ID NO: 344949 - DNA, 666 bp, Artificial Sequence
  derived and/or modified sequence
atggaggacacccaggccatcgactgggacgtggaggaggaggaggagaccgagcagagcagcgagagcctgagatgcaacgtggagcccgtgggcagactgcacatcttcagcggcgcccacggccccgagaaggacttccccctgcacctgggcaagaacgtggtgggcagaatgcccgactgcagcgtggccctgcccttccccagcatcagcaagcagcacgccgagatcgagatcctggcctgggacaaggcccccatcctgagagactgcggcagcctgaacggcacccagatcctgagcagcagcctgccccccccccagaccagcctgctgcccctgagcctgagactgagactgctgggcgaggagcagatcgaccccctgagcagactgctgaagcagctgagcccccagcccctgagctacagactgccccccccccagaccagcctgagccccctgagcccccacctgggccccctgggcgaggagaagatcggccccctgagcagacccctgaagcagctgtgcccccagcccctgagcagcagcctgccccccccccagaccaacctgagccccctgagcccccacctgggccccctgggcgccggccagatcggccccctgagcagacccctgaaccagctgagcctgtag

SEQ ID NO: 344950 - DNA, 738 bp, Artificial Sequence
  derived and/or modified sequence
atggaggacacccaggccatcgactgggacgtggaggaggaggaggagaccgagcagagcagcgagagcctgagatgcaacgtggagcccgtgggcagactgcacatcttcagcggcgcccacggccccgagaaggacttccccctgcacctgggcaagaacgtggtgggcagaatgcccgactgcagcgtggccctgcccttccccagcatcagcaagcagcacgccgagatcgagatcctggcctgggacaaggcccccatcctgagagactgcggcagcctgaacggcacccagatcctgagaccccccaaggtgctgagccccggcgtgagccacagactgagagaccaggagctgatcctgttcgccgacctgctgtgccagtaccacagactggacgtgagcctgcccttcgtgagcagaggccccctgaccgtggaggagacccccagagtgcagggcgagacccagccccagagactgctgctggccgaggacagcgaggaggaggtggacttcctgagcgagagaagaatggtgaagaagagcagaaccaccagcagcagcgtgatcgtgcccgagagcgacgaggagggccacagccccgtgctgggcggcctgggcccccccttcgccttcaacctgaacagcgacaccgacgtggaggagggccagcagcccgccaccgaggaggccagcagcgccgccagaagaggcgccaccgtggaggcctag

SEQ ID NO: 344951 - DNA, 735 bp, Artificial Sequence
  derived and/or modified sequence
atggaggacacccaggccatcgactgggacgtggaggaggaggaggagaccgagcagagcagcgagagcctgagatgcaacgtggagcccgtgggcagactgcacatcttcagcggcgcccacggccccgagaaggacttccccctgcacctgggcaagaacgtggtgggcagaatgcccgactgcagcgtggccctgcccttccccagcatcagcaagcagcacgccgagatcgagatcctggcctgggacaaggcccccatcctgagagactgcggcagcctgaacggcacccagatcctgagaccccccaaggtgctgagccccggcgtgagccacagactgagagaccaggagctgatcctgttcgccgacctgctgtgccagtaccacagactggacgtgagcctgcccttcgtgagcagaggccccctgaccgtggaggagacccccagagtgcagggcgagacccagccccagagactgctgctggccgaggacagcgaggaggaggtggacttcctgagcgagagaagaatggtgaagaagagcagaaccaccagcagcagcgtgatcgtgcccgagagcgacgaggagggccacagccccgtgctgggcggcctgggcccccccttcgccttcaacctgaacagcgacaccgacgtggaggagggccagcagccccacagaggcggcctgctgagctgccagaagagatgccactgcagaggctag

SEQ ID NO: 344952 - DNA, 921 bp, Artificial Sequence
  derived and/or modified sequence
taacatgttggaggtaccaaagacagtgaggacaactacggtgactctgaagacctggacctgcaggctacacagtgctttctggagaatcagggactggaagcagttcaatctatggaggatgagcctacacaggccttcatgttgacgccaccccaggagctgggcccatctcactgttccttccagaccactggtttgctgaattgtaaaatgccccctgccgagaaagcgtcccgcatccgcgcagctgaaaaagtcagccgtggagaccaggagtctccagatgcatgcttaccccctacagtgcctgaggcccccgctccgccccagaaaccacttaactcccaatctcagaaacatcttgctcctcccccgttattgtcaccgctgctgccttcgataaagcctaccgtgcgaaaaacccggcaggatgggagtcaggaggctccagaagcacctttatcctccgagctggagcctttccatccgaaaccaaaaattcggactcggaaaagctcccgtatgacccccttcccagccacgagcgccgccccagagccgcatccgagcacttccacggctcaacccgtgaccccaaagccaacaagccaagcgacccgctcgcgcaccaatcgcagctcagttaaaacccccgagccggtcgttccgactgctcccgaattacagcccagcaccagcacagaccagcccgttacctctgagccaacaagccaggttacacgtggcaggaagagcaggagcagcgttaagacacccgaaaccgtggttccaaccgccctcgagctccaaccctccaccagcacagaccgacctgtgacatcggagccgacttctcaggctacccggggcagaaagaatcggtcctctgtgaagacaccggaacctgttgtgccctag

SEQ ID NO: 344953 - DNA, 666 bp, Artificial Sequence
  derived and/or modified sequence
atggaggatacgcaggccatagattgggatgttgaggaggaggaagagaccgagcagagctcggagtctttacgatgcaatgtggagccagtaggcaggctgcatattttctctggcgcacacggtccggaaaaagacttccctctgcatctgggaaaaaatgttgtggggcgaatgccagattgtagcgtagccctgccttttccttctataagcaagcaacacgcggagattgagattttggcttgggacaaagctccgatcctgcgagactgtgggagcctgaacgggactcagatattgagctcatccttgccccccccccaaacttctttgttacctctgagtctcaggcttcgactgctgggggaagagcagatcgaccctctcagtcggctgcttaagcagctgagcccacagcctctctcctaccggctcccccccccccaaacctccctgtctccactctcaccccacctgggccccctgggcgaggagaaaattggcccactgagcagaccactgaaacagctctgcccgcaacccttgagctcctccctgccacctccccagaccaaccttagcccactgagcccacacctggggcctctcggcgccgggcagattggaccactcagccgtcccttgaaccaattatccctgtag

SEQ ID NO: 344954 - DNA, 738 bp, Artificial Sequence
  derived and/or modified sequence
atggaggacacacaggctatcgattgggacgtggaagaggaggaggaaacagaacagagttctgagtccctgagatgcaatgtggaacccgtgggacgtcttcatattttttccggcgctcacggacctgagaaggactttcccctccacctgggcaagaatgtggttggtcggatgccagactgctctgtggccctgccctttccctcgataagtaagcagcacgcagagatagagattctcgcttgggacaaagcacctatcttgcgcgactgcgggtccttgaatggcactcagatactgagaccccctaaggtcctctctcccggggtaagccaccggttgcgggatcaggagttaatcctttttgctgacctgctttgtcagtatcaccggttggacgttagccttcccttcgtaagtagggggcctcttacagtggaagagacgcctagggtccagggagagacccagccccaaagactgctgctggccgaagactcagaggaagaggtagatttcctaagcgaacgccgtatggtgaagaaaagcaggaccacatctagtagtgtgattgtgccggaaagcgatgaggagggtcactctcctgttctgggcgggttgggaccaccttttgcctttaatctgaacagcgacacagacgtggaagagggccagcagcctgcgaccgaggaggcaagcagtgcggctcggagaggggctacagttgaggcttag

SEQ ID NO: 344955 - DNA, 735 bp, Artificial Sequence
  derived and/or modified sequence
atggaggacacccaagctatcgactgggatgtcgaggaggaagaagagaccgaacagtcctcggaaagcctccgttgcaacgtagaaccagtaggcaggctgcacattttctccggggcccacggtcctgagaaggatttccctctacacctgggaaaaaacgtggtcggtcggatgccagactgcagtgtggcattgcctttcccatctatttcaaagcagcacgccgagatagaaatcctggcatgggacaaggccccaatcttaagggattgtggatcccttaatgggacacagattctccgtccccccaaggttttatctcccggggtgtcacaccggcttagagaccaagagctgatcctgtttgccgacctcctctgccagtaccaccgcttggacgtcagtctgcctttcgtcagtaggggcccccttacagtggaggagacgcctcgggtccagggggagacgcagcctcagcgactgctgttggcagaggacagcgaagaagaagtagacttcctgagcgaacgacggatggttaaaaagtccagaacaacatcgtcttcggtcatcgtgcccgaatcagacgaagagggccactcacctgtcctcggtgggctgggccccccgtttgcttttaatctcaactccgatacagatgtagaggaaggtcagcagcctcatcgcggcggcctgctgtcttgtcaaaaacgctgccactgtagaggttag

SEQ ID NO: 344956 - DNA, 921 bp, Artificial Sequence
  derived and/or modified sequence
tgacatgtgggcggcaccaaggacagcgaggacaactatggagacagcgaggacctggacctgcaggccacccagtgcttcctggagaaccagggcctggaggccgtgcagagcatggaggatgagcccacccaggccttcatgctgaccccaccccaggagctgggccccagccactgcagcttccagaccaccggcctgctgaactgcaagatgcctcctgctgagaaggccagccgcatccgggctgctgagaaggtgtccagaggagaccaggagagcccagatgcctgcctgccccccaccgtgcctgaggccccagccccaccccagaagcccctgaacagccagagccagaagcacctggcccccccacccctgctgagccccctgctgcccagcatcaagcccaccgtgaggaagacccggcaggacggcagccaggaggcccctgaggcccccctgagcagcgagctggagcccttccaccccaagcccaagatccgcaccaggaagagcagcaggatgacccccttccctgccaccagcgctgcccctgagccccaccccagcaccagcacagcccagcctgtgacccccaagcccaccagccaggccaccaggagcaggaccaacagaagctctgtgaagaccccagagcctgtggtgcccacagcccctgagctgcagcccagcaccagcacagaccagcctgtgaccagcgagcccaccagccaggtgacccggggcaggaagagccgcagctctgtgaagaccccagagaccgtggtgcccacagccctggagctgcagcccagcaccagcacagacaggcctgtgaccagcgagcccaccagccaggccacccggggcaggaagaacagaagctctgtgaagaccccagagcctgtggtgccctag

SEQ ID NO: 344957 - DNA, 666 bp, Artificial Sequence
  derived and/or modified sequence
atggaggacacccaggccatcgactgggatgtggaggaggaggaggagacagagcagagcagcgagagcctgcgctgcaatgtggagcctgtgggccgcctgcacatcttcagcggggcccacggccctgagaaggacttccccctgcacctgggcaagaatgtggtgggccgcatgccagactgcagcgtggccctgcccttccccagcatcagcaagcagcacgccgagattgagatcctggcctgggacaaggcccccatcctgcgggactgtggcagcctgaatggcacccagatcctgagcagcagcctgcccccaccccagaccagcctgctgcccctgagcctgcggctgcggctgctgggggaggagcagattgaccccctgagccggctgctgaagcagctgagcccccagcccctgagctaccgcctgcccccaccccagaccagcctgagccccctgagcccccacctgggccccctgggggaggagaagattggccccctgagccggcccctgaagcagctgtgcccccagcccctgagcagcagcctgcccccaccccagaccaacctgagccccctgagcccccacctgggccccctgggcgccggccagatcggccccctgagccggcccctgaaccagctgagcctgtag

SEQ ID NO: 344958 - DNA, 738 bp, Artificial Sequence
  derived and/or modified sequence
atggaggacacccaggccatcgactgggatgtggaggaggaggaggagacagagcagagcagcgagagcctgcgctgcaatgtggagcctgtgggccgcctgcacatcttcagcggggcccacggccctgagaaggacttccccctgcacctgggcaagaatgtggtgggccgcatgccagactgcagcgtggccctgcccttccccagcatcagcaagcagcacgccgagattgagatcctggcctgggacaaggcccccatcctgcgggactgtggcagcctgaatggcacccagatcctgcggccccccaaggtgctgagccctggggtgagccaccggctgcgggaccaggagctgatcctgtttgctgacctgctgtgccagtaccaccggctggatgtgtccctgccctttgtgtcccggggccccctgactgtggaggagaccccccgggtgcagggcgagacccagccccagaggctgctgctggccgaggacagcgaggaggaggtggacttcctgtctgagaggaggatggtgaagaagagcaggaccaccagcagcagcgtcatcgtgcctgagagtgatgaggagggccacagccctgtgctgggcggcctgggccccccatttgccttcaacctgaacagcgacacagatgtggaggagggccagcagcctgccacagaggaggccagcagcgctgcccggcggggggccaccgtggaggcctag

SEQ ID NO: 344959 - DNA, 735 bp, Artificial Sequence
  derived and/or modified sequence
atggaggacacccaggccatcgactgggatgtggaggaggaggaggagacagagcagagcagcgagagcctgcgctgcaatgtggagcctgtgggccgcctgcacatcttcagcggggcccacggccctgagaaggacttccccctgcacctgggcaagaatgtggtgggccgcatgccagactgcagcgtggccctgcccttccccagcatcagcaagcagcacgccgagattgagatcctggcctgggacaaggcccccatcctgcgggactgtggcagcctgaatggcacccagatcctgcggccccccaaggtgctgagccctggggtgagccaccggctgcgggaccaggagctgatcctgtttgctgacctgctgtgccagtaccaccggctggatgtgtccctgccctttgtgtcccggggccccctgactgtggaggagaccccccgggtgcagggcgagacccagccccagaggctgctgctggccgaggacagcgaggaggaggtggacttcctgtctgagaggaggatggtgaagaagagcaggaccaccagcagcagcgtcatcgtgcctgagagtgatgaggagggccacagccctgtgctgggcggcctgggccccccatttgccttcaacctgaacagcgacacagatgtggaggagggccagcagccccacagaggaggcctgctgagctgccagaagcgctgccactgccggggctag

SEQ ID NO: 344960 - DNA, 916 bp, Artificial Sequence
  derived and/or modified sequence
acatgtgggtgggaccaaggactctgaagacaactatggtgattctgaagatctggacctacaagctacccagtgctttctggagaatcagggcctggaagcagtccagagcatggaggatgaacctacccaggccttcatgttgactccaccccaagagcttggcccttcccattgcagcttccagacaacaggcctcctgaattgcaagatgccacctgctgagaaggcttccaggatcagagctgctgagaaggtttccaggggcgatcaggaatctccagatgcttgtctgcctcctacagtacctgaagccccagccccaccccaaaagccccttaactctcagagccagaaacatcttgcacctccgccccttctttctccccttttaccttctatcaagccaaccgttcgtaagaccaggcaagatgggagtcaggaagctccagaggctcccttgtcctcagagctggagcctttccacccaaagcctaaaattagaactcggaagtcctccagaatgacaccctttccagctacctctgctgcccctgagccccacccttccacctccacagcccagccagtcactcccaagcccacatctcaggccactaggagcaggacaaataggtcctctgtcaagacccctgaaccagttgtccccacagcccctgagctccagccttccacctccacagaccagcctgtcacctctgagcccacatctcaggttactaggggaagaaaaagtagatcctctgtcaagacccctgaaacagttgtgcccacagcccttgagctccagccttccacctccaccgaccgacctgtcacctctgaacccacctctcaggctactaggggaagaaaaaatagatcctctgtcaagacccctgaaccagttgtcccc

SEQ ID NO: 344961 - DNA, 921 bp, Artificial Sequence
  derived and/or modified sequence
tgacacgtgggcggcaccaaggacagcgaggacaactacggcgactcagaagatcttgatctgcaggccacgcagtgtttcctcgaaaatcaaggactggaagccgttcagagcatggaagacgagccaacacaggctttcatgctgactcctccccaagagctgggtcccagccactgctcgttccagactacaggtctcttgaattgcaaaatgcctcctgccgagaaagcctcaagaatacgagcggccgaaaaagtgtcgcgaggtgatcaggaatcccctgatgcctgccttccacccaccgtgccggaggctcctgcaccgccgcagaaaccactgaatagccaatcccagaaacacctggcacctcccccactattgtcaccgcttctcccaagcatcaagcccacggtaagaaaaacacggcaggacgggtcacaggaagcgcccgaagcccctttgagtagtgagctggaacctttccacccaaaacctaagattaggacacgcaagtcgtcacgaatgactccatttcccgcaacatctgccgcacctgagccccatccatcaacatcaacagctcaacccgttacgccaaaacccacatcacaggccactcggtctcggactaatcgaagctctgtgaagacgcccgagcctgtggtgcctacagcccccgagctccagccctcaacctctactgatcaaccggtgacgtctgagccgactagtcaggtgactaggggccggaagagcagaagctctgtgaaaacccctgagactgtggtaccaacagcactggaactgcagccatccaccagcaccgatcgccccgtgacttctgagcccacaagccaggccacccggggtaggaagaacagatcgagtgtgaagacccccgagcctgtagtgccgtag

SEQ ID NO: 344962 - DNA, 666 bp, Artificial Sequence
  derived and/or modified sequence
atggaggacacccaggccatcgactgggacgtggaggaggaggaggaaactgaacaatccagcgagtccctccgttgtaacgtcgaaccagttggcaggcttcacatttttagtggtgcccacggtcctgagaaggactttccactacacctgggaaagaacgttgtgggtcgaatgcccgattgctcggtagcactgccattccccagcatcagtaagcaacatgctgagatcgagatcctggcttgggataaggctcccatattgcgcgattgtggcagtcttaatggcacccaaatcttgagttcctcgctccccccaccccagactagcctgttgcccctatccctgcgcttacgcttgctgggtgaagaacaaatagaccccttgagccgccttctcaaacaactctccccacagccactgtcctataggcttcccccccctcaaacgtccctatcgcctcttagcccccatctgggcccgctaggggaggagaaaatcgggcccctatctcgccctttaaaacagctttgtccacaacccctgtcaagctctctgcctcccccccaaacaaacttaagtccgctgtccccacatcttggtccactgggcgcaggacaaattgggccccttagtcgtccgttgaatcagctttccctctag

SEQ ID NO: 344963 - DNA, 738 bp, Artificial Sequence
  derived and/or modified sequence
atggaggacacccaggccatcgactgggacgtggaggaggaggaggagaccgagcagtccagcgagagtctccgctgtaacgttgagccagtcggcagactgcatatttttagcggcgcccacggtccagaaaaggactttcctctgcaccttggcaaaaacgtcgtgggacgtatgccggactgcagcgtggcgctgccatttcccagtatctcaaagcaacatgccgaaattgaaatcttggcgtgggataaagctcctatccttcgggattgcggaagtctgaatggcacacagatcttacgccctccaaaagttctgtcacctggggtgtcacatcggctgcgcgaccaggagctgatcttattcgccgacctgctgtgtcaatatcaccggttggacgtgagcctgcctttcgtttctcggggcccactcacagtggaagagacccccagggtacagggtgagacacagccacaacgtttacttttagctgaagattccgaagaggaggttgattttctttcagagagacggatggttaagaaatcaagaaccactagcagctcagtgatcgtgcctgagtcagatgaagaaggccacagcccagtccttggcggacttggaccaccttttgctttcaatctgaacagtgatacagacgtggaggaaggtcaacaaccggctacagaggaagcctcctccgccgctaggagaggcgcgacagtggaggcttag

SEQ ID NO: 344964 - DNA, 735 bp, Artificial Sequence
  derived and/or modified sequence
atggaggacacccaggccatcgactgggacgtggaggaggaggaggaaactgaacagtcgtctgagtccctgcgttgcaatgttgaacctgtcggacggctgcatattttctcaggcgcccacgggccagagaaagactttcccttgcacttgggcaaaaatgtggttggcagaatgccggattgctctgtcgccctaccctttcccagtatttccaaacagcatgccgagatagaaatacttgcatgggacaaggccccaatactgcgcgattgtgggtccctgaatggcacacaaatcctacgaccaccgaaagtgctaagcccgggggttagtcaccggctacgggatcaggagctgattctcttcgcagatctgctctgtcaataccaccgactggacgtgtctctgccctttgtctcacgcggccccctgactgtcgaagagacgccaagggtgcagggcgaaacacaaccgcaacgcctgctgctggccgaggactctgaggaggaggtggactttctgagcgagagaagaatggttaagaagagcagaacaacttcttctagcgtgatcgtgccagaatcagacgaggagggccacagtcccgtcctgggtgggcttggccccccgttcgctttcaacctgaactcagatacagacgtggaagaggggcagcaaccccaccgcggcgggctgctatcatgccagaagcggtgtcactgtcgggggtag

SEQ ID NO: 344965 - DNA, 276 bp, Artificial Sequence
  derived and/or modified sequence
atgtggaagcctatgccctctcccagtaatatgaaggctagcgctgccctcttgtgtctcttactgaccgcagctgctttctccccacaagggttagcgcagcccgaaagaccacgcacacatcctcagtggaccttcctcctggtcgtgagcctgcaacttggacttattctccagcttcccgctgcgaccgacctgtcgatacgcaaatccctctctcggggttggcgcgctaccgaggggccaccagtagcaaccgttccaggaaagctgtag

SEQ ID NO: 344966 - DNA, 921 bp, Artificial Sequence
  derived and/or modified sequence
tgacatgtcggagggacaaaggattcggaggataattacggggactccgaggatctggacttgcaggccacacagtgctttctggagaatcagggattagaggctgtacagtctatggaagacgagcctacccaggcttttatgttgacaccgcctcaggagctgggcccttcccactgcagtttccagacaacgggcttgctgaattgtaagatgcccccagcagaaaaagccagcagaatacgcgcagccgagaaggtgagtagaggagaccaggaaagccctgatgcgtgccttccaccaactgtaccagaagcccctgcccctcctcagaagccactgaatagccagtcccaaaagcacctcgcaccaccccctctgctttctccgctgcttccatctattaagccaacggttagaaaaacacgccaggacggatcgcaagaggcccctgaggcccctttaagctccgagctggaacccttccacccaaaacccaagatcagaacgcggaaatccagcagaatgacaccattcccggctacgagcgctgccccagaacctcaccctagtacctctaccgcccagcccgtaaccccaaaacccaccagccaggccacgcgaagtcgcacaaacaggtcatccgtcaagaccccggaacctgttgtgcccacagccccagagctgcaaccaagtacttccactgatcaacccgtgacatcagagcctacatcccaagtgaccagggggaggaagtcacggtcgagcgtaaaaaccccagagaccgtggtacctaccgccctggagttacaaccttctaccagcacagacaggcccgtgaccagcgagcccacgtctcaggcaacccgcggtcgcaaaaatcgaagctctgtgaaaacacccgagccggtggtaccctag

SEQ ID NO: 344967 - DNA, 666 bp, Artificial Sequence
  derived and/or modified sequence
atggaagatacgcaggccatcgactgggacgtggaggaagaggaagagacggaacagagttcagaaagcttacgttgtaatgtagagcctgtgggaagactacatatctttagcggcgcacacggccctgagaaagattttccacttcatctgggtaagaatgtggtgggcagaatgccagactgctccgtggccctgccattcccctcaatcagtaaacaacatgccgaaatcgaaattttagcttgggacaaagcacccatactgcgtgactgtggctcgttgaatgggactcaaatcctatcaagtagcctgccgccaccccagacatctctgctgccactctctttgcgcttgcgccttctgggagaagaacagattgatccattgtcaagactactcaaacagctgagcccacagccgctctcttaccggttaccaccaccccaaacatctctctcacctctaagccctcacctgggtccgctgggggaggaaaaaataggaccgctgtccaggccattgaagcagttatgtccgcagcctctgagcagctctctgcccccaccacagacgaacctaagcccactctcccctcatcttggcccactgggagccggacagatcggcccactaagccggccattgaaccagctgagcctgtag

SEQ ID NO: 344968 - DNA, 738 bp, Artificial Sequence
  derived and/or modified sequence
atggaagacacacaagccattgattgggacgtggaggaagaggaagagacagagcaaagttccgagtctctgagatgtaatgtggaaccagtggggagacttcacatcttctctggagctcatggaccagaaaaggactttcccttgcacctggggaaaaacgtcgtcggacgtatgcctgactgcagtgtggccctcccatttccctccatatccaaacaacatgctgagattgagattctggcatgggacaaagctcccattctgagggactgtggttccttgaacggaactcaaatattacggccacccaaggtgctctcaccaggcgtgtcacaccgcttgcgcgaccaggagctcatacttttcgctgaccttctgtgtcagtatcatcggctggacgtgagcttacccttcgtgtcgcggggacccttgactgtggaagaaacgccacgcgtgcagggagaaacccaaccccagcgccttttgctggcagaagactcagaggaggaagttgactttttgagcgaaaggagaatggttaaaaagtcccgaaccaccagcagtagcgttatcgtccctgagagtgacgaagaagggcactcccccgtcctaggaggactgggtccaccttttgctttcaatctgaactcggacactgatgtagaagagggacagcagccagctactgaagaggcctcttccgcagcacgccgaggcgcaacggttgaggcttag

SEQ ID NO: 344969 - DNA, 735 bp, Artificial Sequence
  derived and/or modified sequence
atggaagacacacaggccattgactgggacgtggaggaagaagaggagacagagcagagcagcgagtcccttagatgcaacgttgagccggtcggacggctccacatcttctccggggctcacggccctgaaaaggatttcccactccacctcggcaagaatgtggtaggacgtatgcccgattgcagtgtggctctcccatttccatccatctcaaaacagcacgcagagatcgaaatcctggcttgggacaaggctcccattcttagagactgcgggtcactgaacggaacacagatcctgagaccacccaaagtgctgtctcccggagttagccatagactgcgagaccaggagctgatcttgttcgccgacctcctgtgtcagtatcacagattggatgtgagcctgcccttcgtgagccgaggacccctgactgtcgaggaaaccccaagagtgcaaggcgaaacccagccgcagaggctgttactggcagaagatagtgaagaagaagtggacttcctgagcgaacgaagaatggttaaaaaatccaggaccaccagcagcagtgtgatagttcccgaatccgacgaggaaggtcactcaccagtgctcggcggactcggaccaccgtttgctttcaacttaaatagtgataccgatgttgaagagggtcagcaaccccatcggggtgggctgctgtcttgccagaaaaggtgccattgccggggatag

SEQ ID NO: 344970 - DNA, 921 bp, Artificial Sequence
  derived and/or modified sequence
tagcatgtgggggggaccaaggacagcgaggacaattacggagatagcgaggatctagatctgcaggctacacagtgttttctcgaaaatcaaggcctcgaggcggtgcagtctatggaagacgagcctacccaggcttttatgcttaccccgcctcaagagctaggaccctcccattgttccttccagaccacagggcttttgaattgcaagatgccgccagctgagaaagctagccgaattcgggccgccgaaaaagtgtcgaggggagaccaggagagtcctgatgcgtgtctgccccctaccgtgccagaggccccagccccccctcagaaacccttgaattcccagtctcagaaacatttagcaccaccccctttgctgtctccccttcttcctagcatcaaacctaccgtcagaaagaccaggcaggacggtagtcaggaggcccctgaagccccgctgagttcagagctcgaacctttccaccccaaaccaaaaatacgtactcggaaatccagccgtatgaccccattccccgccacgtcagctgcccctgaacctcaccccagtacatccacagcacagcccgtgaccccgaaacccacatcccaagccacaaggtccagaacaaatagaagttctgtgaaaaccccagaacccgtagtgccaaccgcaccggagttgcagcccagcacaagcaccgaccaacctgtgacctccgagcccacctcccaggttacacggggccgcaagagcagatcctcagtgaagacccccgagactgtagtgcccacggccctggagctgcagccgtctacctcaacagatcgcccagtgacttccgagcctaccagccaggccacaagaggtaggaaaaaccgttcatcggtaaagacgcccgaaccggtggtaccctag

SEQ ID NO: 344971 - DNA, 921 bp, Artificial Sequence
  derived and/or modified sequence
tgacacgtcggtgggactaaagatagtgaagacaactatggagacagcgaggaccttgacctccaggctacccaatgctttctagaaaatcagggcctagaggctgtgcagtcaatggaagatgaaccaacccaggcctttatgctcactccaccccaagagctgggtcccagccactgttccttccagacaactggactcctcaactgtaaaatgcctcctgccgagaaggcctctcggatccgcgcagcagaaaaggtctctcgcggcgaccaagagtctccagatgcttgtttacccccaaccgtcccagaagcccctgcccccccccagaaaccgctgaacagtcaatctcagaagcacttggctccacctccattactttcccctctgttgcctagcatcaaacctaccgtgaggaaaaccagacaggatggttcccaggaggctcccgaggcacctttgtcttctgagctggaaccgttccaccccaaacctaaaattcgaaccagaaagagcagccgtatgaccccctttcccgcaacttctgccgcccccgaacctcatccatctacttccacggcccagcccgtcacccccaaacccacgtctcaagcaacccgctctcgcaccaaccgcagctccgtgaaaacgcccgagcctgtggtgcctactgctcctgagttacaaccttctacctcaaccgaccaaccagtaacatcagagcctacgagccaggtgaccagaggaagaaaatctagatcaagcgtgaaaactcctgagactgtggtccccactgctctggaactgcaaccctccacatctacagatcggccagtaacctcagagccaacttcacaagccaccagaggccgcaaaaatcgctcatcggtcaagactcctgagccagtggttccctag

SEQ ID NO: 344972 - DNA, 921 bp, Artificial Sequence
  derived and/or modified sequence
taacatgtagggggcaccaaggactccgaggacaactatggagattctgaggatttagatctgcaggccacccagtgttttctggagaaccagggcctagaagcagtccagtcaatggaggacgagccaacacaggcgtttatgctcactccaccccaggagctgggaccttcacattgtagcttccaaactacgggactgctcaactgtaagatgccccctgcggaaaaggcatcccgaatcagagctgcagaaaaagtgagtaggggcgatcaggagagcccagacgcctgtcttcctcctacagttccagaagccccagcccctccccaaaagccactcaattctcagtcgcaaaaacacctggcgccaccaccactgctttccccattgctgccatccatcaaaccaactgtgcggaagaccagacaggacggttcacaggaagccccagaggcaccactcagcagtgagctggaaccatttcatcctaaaccgaaaattcggacacggaaatcaagcagaatgacaccgttcccggcaacctctgccgcccccgaacctcatccaagcacatccaccgcccaacctgtaacacccaagccgacctctcaggcaacacgctctcgcacaaaccgatcaagtgttaaaacccctgagcccgtggtacccactgctccagagctgcagccctccacatcgacagatcaacccgtgactagtgaacctacctcacaagtgactcgaggtcggaagagccggtcctccgtgaaaacccctgaaacagtcgttccaactgccctggaacttcagccaagcactagcacagaccgacctgtcactagcgagcccacgtcacaggctactagaggcaggaaaaaccgatcgtccgtcaaaacaccagagccagttgtgccatag

SEQ ID NO: 344973 - DNA, 921 bp, Artificial Sequence
  derived and/or modified sequence
tgacacgtcggcgggacgaaagactctgaggacaactacggtgactcagaagatttggacctgcaggctacacagtgtttcctggaaaaccagggtttggaagctgtccaaagtatggaggacgagccaacccaggccttcatgctcacacctccacaggaacttgggccgtcccattgttccttccagaccactggtctactcaactgtaagatgcccccagccgaaaaagcgtcacggattcgcgccgccgaaaaggtgtcacgaggtgaccaggagagccctgacgcgtgcctgcctccgaccgtgcccgaagctccagcgccaccccagaaaccactgaacagtcagtcacagaaacatctggctccccctcctctgctcagccccttactgcccagcattaaaccaaccgtgcggaaaacccgccaggacggatcccaggaggctcccgaggctccactgtcttctgaacttgaaccattccatcctaagcctaagattcggacccgcaaatcctcgaggatgaccccatttccggcaaccagcgccgcccctgaacctcacccgtctactagtaccgcccagccagtgacacccaagccaactagccaggctacgaggtctaggactaaccggagctctgtaaagacacccgagccggtcgttcccactgcacccgaactgcagccctcaacaagcaccgatcaacctgtgacctccgaaccgacatcacaagtcacacgcggacgcaagtctcgaagcagcgttaagactcccgaaaccgtcgtcccgacagccctggaactgcagccatccactagtaccgatagacctgtgaccagcgagcctacctcccaagccactaggggacgcaagaatcgctcatcagtgaagaccccggaaccggtcgtgccttag

SEQ ID NO: 344974 - DNA, 738 bp, Artificial Sequence
  derived and/or modified sequence
atggaggacactcaggctattgattgggacgtggaagaggaagaagagacagaacaaagttcagaaagcctgcgctgcaacgtcgagccagttggccggcttcacatctttagcggcgctcatggcccagagaaagacttccccctgcatctgggcaaaaatgtggttgggcgcatgcctgactgttccgttgccctgccgtttccctcgatttctaagcaacatgccgagatcgagatcctggcctgggacaaggctccaatcctgagggactgtggatctctcaacgggacgcagatcttgaggccccccaaggtcctgtcacctggggtgagtcatcggctgagagaccaggagctcatcttattcgcagacctgctgtgccaatatcaccgcctggacgttagcttaccttttgttagcagaggacccctgacggtggaagaaaccccccgagttcaaggggagacacagccccagagactgctgctagctgaggattcggaggaagaggtcgatttcctgagcgagagacgcatggtaaagaagagccggaccacaagctcatcagtgatcgttccggagtctgacgaagaagggcatagccccgtcctgggtgggctaggaccaccttttgctttcaacttgaactccgacaccgacgtcgaggagggccagcaaccagccaccgaagaggcatcaagcgcggctagacggggagccacggtcgaagcgtag

SEQ ID NO: 344975 - DNA, 921 bp, Artificial Sequence
  derived and/or modified sequence
tagcacgtcggcggcactaaggattctgaagataactacggcgactccgaggatctagatttacaggcaacgcagtgcttcctagagaaccagggcttggaagctgttcagagtatggaggacgagcctactcaggcgtttatgcttactcctccacaagagctcgggccaagtcactgcagttttcagactactgggctcctcaattgcaagatgcccccagcggaaaaggcgagtcgtatcagggccgctgaaaaagtgtcaagaggggatcaggagtcaccggatgcctgtcttccccctacagtgcctgaggcacccgccccgcctcagaaaccgcttaattcccagtcccagaaacatctggctcccccgccactcctgtctcccttgttgccatctatcaagcccacggtacggaaaacacgccaggatggttcacaggaggcccccgaggctccactgagcagtgaactggaaccgttccacccaaaaccaaagataaggaccagaaagtcatcaaggatgaccccctttcctgcaacctccgccgcccccgaaccacatccgagcacatctactgcccaaccggtgacccctaaacctacgtctcaggctacaagatctagaaccaatcgcagtagcgtgaagaccccagaacctgttgtccctacagcgcctgagttacaaccatcaactagcactgatcagccggtgacttcggagcccactagccaggtcactcgtggacgaaagagccgaagctccgtcaaaacccctgagacagtggtaccgacagcactggagctccagccatccacctcaactgacaggcctgtaacaagcgagcccacatcacaggctacccggggaaggaagaatagaagtagcgttaagacccctgagccagttgtaccgtag

SEQ ID NO: 344976 - DNA, 921 bp, Artificial Sequence
  derived and/or modified sequence
tgacatgtaggaggcactaaggactccgaagacaattacggagactctgaagacctggatctgcaagcgacacagtgtttcttggaaaaccagggtctcgaggccgttcagtcgatggaggacgaacccactcaagccttcatgctgacaccccctcaagaactgggacctagtcactgctctttccagacaaccggacttttgaactgtaagatgcctcccgccgagaaggccagccgcattagagcagccgagaaggttagccgaggcgaccaggagtcccctgacgcctgcctccctcccacagtaccagaggcgccagcaccccctcagaagcctttgaacagccaatcacagaagcacttggcgccgcctccccttctctcaccccttctgccttccatcaagccaactgtcaggaaaactagacaagacgggagtcaggaggcccctgaggctccactgagctctgagttggaaccattccaccccaagccaaaaattagaaccaggaaatcttcccggatgacccctttcccagctaccagcgctgcccccgaaccgcacccatcgacttctacggcgcagccagtaacccctaagccaacctcccaggcaactagaagtcgtacaaacagatcttctgtgaaaactcctgagcctgtggtcccaaccgccccagaactgcagccttcaacatcaaccgatcagcccgtgacaagcgagcctacttctcaggtgacacggggcaggaagagtagatcatccgtgaagacacccgagaccgttgttcccacggccctcgagctgcagccaagcacttcaaccgatagacccgtaacatcagagcctacaagccaagccactcgggggcgcaaaaatcgcagctctgttaagacacctgaacctgtcgtcccatag

SEQ ID NO: 344977 - DNA, 921 bp, Artificial Sequence
  derived and/or modified sequence
tagcacgttggtgggaccaaggactcagaggataattatggcgattccgaagacctggatctccaggctacccagtgcttcctggaaaaccagggcctggaggccgtacagtctatggaggacgagccgacccaagctttcatgctgactccccctcaggagctcggacccagtcattgttcattccagactacgggccttctgaactgcaagatgcccccagcagaaaaagcctcacgaattcgcgcagccgaaaaggtttctcggggtgaccaggaatcaccagacgcttgtctccctcctaccgttccggaggcccctgccccgccacagaagcctctgaactcccagagccaaaaacatctggctccccctccgctgttatccccattgcttccatctatcaaaccaacagtgcggaaaactcggcaggatggcagccaggaggcgcctgaggcccctctgtcctcagagcttgaacccttccaccctaaaccaaagattcgaacaaggaaatcctctagaatgacacccttcccagccacctccgcggctcccgagccccacccgagtacatctacagctcagccggtaacccctaagcctaccagtcaggctacacggtctaggaccaacagatccagcgtaaagacgccagaacccgtcgtgcccaccgcccctgaacttcagcccagtacttcaaccgatcaaccagttacatctgaaccaacatctcaggtgacccgcggccgcaagtctagaagtagcgtcaaaacaccagaaactgtggtgccaaccgccctggaacttcagccgagcacatcaacggatcgcccagtgacctctgagccgacatctcaggccaccaggggcaggaagaacaggtcatctgttaagacccccgaacctgttgttccttag

SEQ ID NO: 344978 - DNA, 735 bp, Artificial Sequence
  derived and/or modified sequence
atggaagatactcaggccatagactgggatgtggaagaagaagaggaaaccgaacagtcctctgaaagcctccgctgtaacgtggagccggtgggacgcctgcacatatttagtggcgcccacggccccgagaaagacttccccctccatttaggcaagaatgtggtgggaaggatgccagattgttctgtcgcattaccgttccccagtatctccaaacaacatgctgagatagaaatactggcatgggacaaagctcctattttaagagattgtgggtcccttaacggaacccagattcttaggcctcccaaagttcttagccccggtgtctctcacaggctcagggaccaggaactgattttatttgcggacttgttgtgtcagtatcaccgcctggacgttagtctaccctttgtgagcaggggacccctgacagtcgaagagacccccagggtccagggggagacacagccccagcgtctactcctcgccgaggattctgaggaggaagtagattttctttcggagaggaggatggtaaagaaaagcaggacaactagctctagcgttatcgtgccggaatctgatgaagaaggacactcccctgtgctcggaggcttgggcccgccctttgctttcaacctcaatagcgataccgatgtggaagaggggcagcaacctcacagaggggggctcctgtcctgtcagaagaggtgccattgtaggggttag

SEQ ID NO: 344979 - DNA, 735 bp, Artificial Sequence
  derived and/or modified sequence
atggaagatactcaggccatagactgggacgtggaagaggaagaagaaacagaacagtcttcagagtcactacggtgcaatgtagagccagttggccgcctgcacattttctcaggtgcccatggacccgagaaggatttccctctgcacctggggaagaatgtagtgggccggatgcctgattgctctgttgcactcccgtttccttccattagcaaacagcacgcagagatcgagatcctggcttgggacaaggccccgatccttagagattgcggtagtctgaatggaacccagatactgcgcccccctaaagtcctgtctcctggggtctctcatagactcagagatcaggagctgattctatttgccgacctgttatgtcagtatcatcgccttgatgtatccttaccattcgtgagtagagggccactgacggtcgaagaaacgcccagagtgcagggagaaacccagccccagcgcttacttctggcggaggattcggaggaggaagtcgattttctcagcgaacgcagaatggttaagaagagtcggaccacatcctcgagtgtgatcgttccagaatcggatgaggaagggcactcacccgtcctgggcggacttggcccgcctttcgcgtttaatctgaattccgacacagacgtcgaggaaggacaacaaccacaccgcggaggactgctgtcctgccagaaacggtgccactgtcgtgggtag

SEQ ID NO: 344980 - DNA, 735 bp, Artificial Sequence
  derived and/or modified sequence
atggaggatactcaggctattgactgggacgtggaagaagaagaggaaaccgagcagtccagtgagagcctgaggtgtaacgtggaacctgtcggacgtctacacatcttcagcggagctcatggacccgaaaaggatttcccgcttcacctaggcaaaaatgtcgttggccgaatgccagactgctcagtggccctgccttttccgagcatatcgaaacaacacgccgaaatagagattctcgcctgggataaagcaccaattctgcgtgattgcggctctttaaatggcacacaaatcctcaggccccccaaggtgctgtcccccggagtctcccatcgcctgcgtgatcaggaattaattttgtttgcagacctcttgtgccagtaccacaggctggatgtctctcttccatttgtttctaggggtccactcaccgtggaggagacccctcgcgtgcagggagaaacacaaccgcagcgattgctccttgccgaagacagtgaggaggaggtggattttctgagcgagcgcagaatggtgaagaagtcaaggaccaccagttctagcgtgattgtgccagaaagcgacgaggaggggcacagcccggtgttgggtggcctgggaccccctttcgcctttaatctgaatagcgacacagatgtcgaggagggacagcagccccacagagggggactgctgagctgccagaagcgatgccactgccgtggctag

SEQ ID NO: 344981 - DNA, 735 bp, Artificial Sequence
  derived and/or modified sequence
atggaggatactcaggctatcgactgggatgttgaagaggaggaggaaaccgagcaatcgagcgaatcacttcgctgtaacgtggaacctgttggaagactgcatatcttttccggggcgcatggtcccgaaaaggacttccctttacacttaggcaaaaacgtcgtaggccggatgccagattgtagcgtggccttgccgttcccttccattagcaaacagcatgccgaaatagagatcttggcctgggataaggcaccaatcctgagggattgcggatccctgaacggaacccagatccttaggcccccaaaggtcctctctcctggagtttcccaccgactgcgggaccaggaactgattctgttcgcggatcttctctgtcaatatcatcgtctggacgtttctctgccctttgtttctagaggtccactcacagtagaggagaccccaagagtgcaaggagagacacagccgcagaggctgttactggcggaagactcggaggaggaggtagactttttgtccgagagacggatggtgaaaaagagccggacaactagctccagtgtcatcgtccccgaatccgatgaggagggacacagccctgtgcttgggggacttgggcctccatttgcctttaatcttaattcggatacagacgtggaggagggtcagcagccccacaggggcgggttactttcctgccagaagcgctgccactgtcggggttag

SEQ ID NO: 344982 - DNA, 738 bp, Artificial Sequence
  derived and/or modified sequence
atggaagatacccaggccatcgattgggacgtcgaggaagaagaggaaaccgaacaaagtagtgaatcactcaggtgcaacgtggaacctgttggccggctgcatatcttctcaggagcgcacgggcccgaaaaggattttcccctccacctgggcaagaatgtggtcggcagaatgcctgattgttcggttgcgttgcccttcccgtccatctcgaagcaacacgcagagatcgaaatcctcgcttgggataaagccccgatcctgagggactgcgggtctttgaatggcactcaaatcctgcggccccccaaggttctaagtcccggagtaagccataggctgagagaccaggagctgatcctgttcgcagacctcctgtgccaatatcatcgcctggacgtgtccctgccattcgtctctagggggccactgactgtcgaagagactcctagagtccagggggagacgcagccccagcgattgctgctggcagaggattccgaagaggaagttgactttctctcagaaaggaggatggtaaagaagtctcggactacttcatcaagcgtaattgtgccagaatccgatgaggaaggacactcaccggtgttgggcggtctcggacccccatttgccttcaatctcaactctgacaccgatgtcgaagaaggccaacagccagcgactgaagaggcttcatccgctgcacggcggggcgctacggtggaagcctag

SEQ ID NO: 344983 - DNA, 738 bp, Artificial Sequence
  derived and/or modified sequence
atggaggatactcaggccattgactgggacgtagaagaagaggaggagactgaacagtccagtgaatcgctccggtgtaacgtggaacctgtgggccggctgcacatatttagcggcgcccatgggcctgagaaagatttcccgctgcacctggggaagaacgtggtggggcggatgccggattgctcagttgctctgccttttcccagtatctcgaaacagcatgccgagattgaaattcttgcctgggacaaggcccctattcttcgggactgtgggagtctaaatgggacccagattctgagaccacctaaggtgctcagccccggagtgtcacaccggctgcgcgatcaggaacttatcctattcgcagacttactttgtcagtatcatagactcgacgtgtcgttgccgtttgtgtctcgcggaccattgacagtggaggagactccacgggttcagggggaaactcaaccccagagactgctgctcgccgaggatagcgaagaggaagtcgacttcctgagcgaacggaggatggtgaagaagtctaggacaacctcctctagtgttattgttcctgagagcgacgaagagggtcactcccctgtgctcggggggctgggccctccttttgcctttaacctaaactcagacactgatgtcgaggaaggtcagcagcctgcgaccgaggaggcctctagtgccgctaggcggggcgcaactgtcgaagcctag

SEQ ID NO: 344984 - DNA, 738 bp, Artificial Sequence
  derived and/or modified sequence
atggaagatactcaagctatcgattgggatgtggaggaagaggaggagacggagcagagttctgagagtctgcgatgcaatgttgagcctgtggggcgactgcacatctttagtggcgcccacggacctgaaaaggattttccactccatctcggaaaaaatgtcgtcgggaggatgccagactgtagcgtggccttgccttttccaagcatctctaagcagcacgcagaaatcgagattttagcttgggataaagccccaattcttcgagattgcggaagcctaaacggcacgcagatcctacggccccccaaggtcttgagccctggagtgtcacatcgcctcagggaccaagagctcatcctgtttgccgacctactgtgccagtatcaccgtctcgatgtctccctccctttcgtaagccgtggccccctcactgtcgaagaaactccccgcgtgcagggggagacacagcctcagcgtctgctgctcgccgaggactcagaggaggaagtcgacttcctgagtgaacgcaggatggtaaagaaatcccgaactacatcgagcagcgtaatcgtccccgagtctgacgaggaaggacacagccccgtgctgggcggactcggaccaccctttgcattcaacctcaacagcgacactgatgttgaggagggtcagcaacccgctacagaagaagctagcagcgcagcacgacgtggagctacggtggaagcttag

SEQ ID NO: 344985 - DNA, 666 bp, Artificial Sequence
  derived and/or modified sequence
atggaggatactcaggccatcgactgggacgttgaggaggaagaagagacagagcagtccagcgagagcctccggtgtaacgtggaaccagtaggccgtttacacatattctcgggggcccacggtccagagaaggacttcccattacacctaggtaagaacgttgttgggcggatgcccgactgctctgtagcgctgcccttcccgagtatcagcaaacagcatgctgaaatcgagatcctcgcctgggacaaagccccaatcctgcgtgactgcggatcacttaatgggacccaaattctctcttcttccctccccccgcctcagaccagcttactgcctctgagtctgcggctgagactgttgggagaagagcagatagatccgctctcaaggcttctgaaacaactttcaccccagcctctctcataccgcctgcctcctccccagacctcattatcaccactatccccacatctcggcccgctgggggaggagaaaatcgggccgctgtcaagacctttgaaacagttgtgtccgcagcctctgtcatccagcctgcccccaccccagactaatttgagccctctttctccccatctggggccactgggtgctgggcagataggcccacttagtaggccgttaaatcaactgagtctctag

SEQ ID NO: 344986 - DNA, 666 bp, Artificial Sequence
  derived and/or modified sequence
atggaagacactcaggccatagactgggatgtggaagaagaggaagagactgagcagagcagtgaaagtctcaggtgtaatgtcgaaccagttggtagactgcacatattcagtggcgctcatggacctgagaaggactttccgctgcacctgggcaaaaatgtggtgggtcggatgcccgattgctcggttgccttgccctttcccagtatttctaagcagcatgccgaaatcgagatactggcatgggataaggccccaattctgagggattgcggcagtctgaacggtacacagattctgagctcctcgcttccccctccacagacatcattacttccactgtccctcaggctacgcttgctgggggaagagcagattgacccgctgtctcgtctgctcaaacagctgtctccacaacccctatcctataggttacctcctcctcagacttctctaagcccattaagcccccacttgggcccgctcggagaagagaagatcgggcctctatcacgtcccctgaaacagctttgtccacagcccctgagtagcagcttgccaccgccccagactaaccttagtcctctttctccccacctcggacctctgggtgccgggcaaatcggcccactttcccgccccctcaatcaactgtccttgtag

SEQ ID NO: 344987 - DNA, 738 bp, Artificial Sequence
  derived and/or modified sequence
atggaggatacgcaggcaattgattgggatgtggaggaagaggaagaaacagagcagtcctccgaatctctaaggtgtaatgtggagccggtgggacgcctacatattttctctggcgctcatgggccggagaaagactttcctcttcacctgggcaagaacgtagttggcagaatgcctgattgttccgtggcgctgcctttcccatctatcagcaaacagcatgccgagatcgaaatcttagcttgggataaagctcctatcctcagggactgtggcagtcttaatggcacgcagattcttcgtcctcctaaagtcctttcaccaggcgtctcgcatagactccgtgaccaggagctgattctctttgcagacttgttgtgtcagtatcaccggttggatgtgtccctgccttttgtgagtcgcgggcccctgactgtcgaggagaccccaagggttcagggcgaaactcaaccgcaacgtctgctgctggcggaagatagtgaagaggaggtggatttcttgagcgagaggcgtatggtgaaaaaaagtcgcaccacaagtagcagtgtcattgtcccagaatccgatgaggaggggcattcgccggttctcggcgggctggggccaccattcgccttcaacttaaactcagacactgacgtcgaagagggccagcagcctgctactgaggaggccagtagcgccgcacggaggggagcaacagtcgaggcctag

SEQ ID NO: 344988 - DNA, 735 bp, Artificial Sequence
  derived and/or modified sequence
atggaagacactcaggccattgattgggacgtggaggaagaagaagaaacggaacaatcttcagaatctctaagatgtaatgtcgaaccagttggtaggctccacatcttctcgggcgctcatgggccggagaaagattttccccttcatctgggcaagaacgttgtcggcagaatgccagactgctccgtcgccctaccatttccctctatatctaaacagcatgccgaaatcgaaatcctagcatgggataaagcacccatcctgagggactgcggctctctgaacggaactcaaattttgcgacccccaaaggttctgtctccgggcgtaagccaccgactgagggaccaagaactgattctcttcgccgacctcctgtgccaataccatcggttggacgtctcgctgcccttcgtgtcacgaggccctctcacagtggaggaaaccccgagggtccagggcgagacccagccacagcgactcctcttggctgaggattcagaggaggaagtcgatttcttatcagagcgtagaatggtaaagaagtctcgcaccacctcttcttctgtcatcgtgccggaatcagacgaggaagggcatagcccagtacttggtggcctgggccccccctttgcattcaatctcaatagcgacactgatgtcgaggaggggcagcagccacaccgcggcggcctgctttcatgccagaagagatgccactgcagggggtag

SEQ ID NO: 344989 - DNA, 666 bp, Artificial Sequence
  derived and/or modified sequence
atggaagatacgcaagcaatcgattgggacgtggaggaggaggaagaaaccgagcagtccagcgaatccctgaggtgcaacgtggaacctgtaggaaggctccatatcttcagtggcgctcatggcccggaaaaagatttccctctgcaccttggtaaaaacgtcgtgggacgcatgcccgattgtagcgtggcactgccatttccctctatatccaagcagcatgcggaaatcgagatcctagcatgggacaaggcacccattctccgcgattgcggaagcctgaacgggactcagatccttagtagctcactgcctcctccgcagactagcttactaccactctcgctccgactgaggttgctgggagaggagcagattgacccgctcagccgcctgctgaagcagctgagtccccagcccctctcatatagacttccccctccccagaccagtctcagcccgctgtccccacatctgggcccactgggcgaggaaaagataggtcccttgtccaggccgctgaagcagctctgtccacagcccctgcggagtagtctcccgccaccacagacgaatttaagtccacttagcccccacctcggcccattgggtgctgggcaaattggacccttgagtcggcctttgaatcaactctccctctag

SEQ ID NO: 344990 - DNA, 666 bp, Artificial Sequence
  derived and/or modified sequence
atggaggacactcaggcgattgactgggacgtggaggaggaggaggagacagaacaatctagcgaaagcctaaggtgcaacgtcgagcctgtggggcgtttacacatcttctctggagcccatggcccagagaaggacttcccgctccacctggggaaaaatgtggtggggcggatgcccgactgctctgtagcccttccctttccctccatatctaagcagcatgccgagatcgaaatacttgcttgggataaggccccaattttacgtgactgcggcagcttaaacggcacccagattctctcttcaagcctacccccaccacagacttccctactaccgctttcactgagactcagactgctgggggaggagcagatcgaccccctctctcggctcctgaagcaactttctccccaacctctgagttacaggctgcccccaccccaaaccagcctcagcccattgtccccgcatttggggcctctaggcgaagagaaaataggcccactgagccgtcccctgaaacaactgtgcccccagccccttagttctagcttgccaccacctcagactaacctgtccccactctcaccacatctgggccctctgggtgccggtcagatcggtcccttgagcaggccactgaaccagctctccctctag

SEQ ID NO: 344991 - DNA, 738 bp, Artificial Sequence
  derived and/or modified sequence
atggaagatactcaggccattgactgggacgtcgaggaagaggaggagactgaacaaagctcagaaagcctgcgatgcaatgtggagcccgtgggtcgattgcatattttcagtggtgcgcacgggccggagaaggattttccacttcacctaggcaaaaacgtggtgggccgcatgcctgattgttctgtcgctctaccattccccagcattagcaagcagcacgccgagatcgaaattctggcttgggataaagcccccatcttgcgcgactgcggcagtctcaacggcacacagattctgagaccccctaaagtgttatcaccgggtgtgagccacaggttaagggaccaagaactaatactgtttgctgaccttctgtgtcaataccatcgcttggacgtcagcctccctttcgtctctaggggcccccttaccgtggaggagacaccccgcgtccagggggaaacgcaaccgcaaaggctcctgctggccgaggatagtgaggaagaggtcgactttctgtcagaacggcggatggttaagaagtctcgtaccacgtcatcatccgttatcgttcccgaatcagatgaggaaggccactcccccgttctgggtggtcttggccccccatttgcttttaacttaaattctgacacagacgtggaagaagggcagcagccggctaccgaagaagcctcttccgccgcccgccgcggagctacggtggaagcttag

SEQ ID NO: 344992 - DNA, 735 bp, Artificial Sequence
  derived and/or modified sequence
atggaggacacacaggctatcgactgggacgtggaagaggaagaggaaacagagcagtcctcagaatctcttcgctgcaacgtggaaccggtcggaagattacatatttttagtggcgctcatgggcctgagaaagactttcccttgcatctaggtaaaaacgtagtgggtagaatgccagattgttctgtagccctccctttcccaagtatctcaaagcaacacgcagaaatcgagatcctggcctgggataaagcaccaattctgcgggactgcggatctttgaatggtacccagatcttaaggccccccaaggtgctgagtcccggggtcagccatcggctgagggaccaggaactcattctctttgctgacctgctctgccagtatcacaggcttgatgtatcactcccttttgtgtccaggggcccactcacagtagaagagacccccagggttcaaggtgagacccagccgcaacgtctgctgctggcagaggattcggaggaggaggtcgactttctgagtgaaaggcgcatggtgaagaagtcacgtacaacttcgtctagcgtcatagtacctgagtctgacgaagaagggcactcaccagtgctcgggggcttgggaccaccgttcgcttttaatctcaacagtgacaccgacgtggaggagggacagcaaccgcatcgcggcggattgctgtcttgccaaaaacgttgccattgccgcgggtag

SEQ ID NO: 344993 - DNA, 735 bp, Artificial Sequence
  derived and/or modified sequence
atggaggatacccaggctattgactgggacgtggaggaggaagaggaaactgaacaaagcagcgaaagtcttaggtgtaatgtggagcccgttggacggctacatatcttcagcggagcacacggccctgagaaagattttcctctccacttgggcaagaatgtggtgggcagaatgccagattgctccgttgcactccctttcccatccatctctaagcagcacgccgagattgaaattctagcctgggataaagctccaatactcagagactgtggctccctgaacggaactcagattctccggcccccaaaggtcctaagtcccggcgtgtcccaccggttgagagaccaggaattgatcctattcgctgacctgctatgccagtaccatagactcgacgtgagcttgccctttgtaagtagggggccactcactgtagaggaaacacccagggtccagggggaaacccagccccagcggctgctgctcgccgaggatagtgaggaagaagtggatttcctgagtgagagaaggatggtgaaaaaaagcagaacaacctctagttccgtgatagtccctgagtctgatgaagaaggccactccccagtgttagggggacttgggccaccgtttgccttcaacctcaactcagatactgacgttgaggaaggtcagcagccccaccgcgggggcttattgtcatgccagaaaaggtgccattgtcggggttag

SEQ ID NO: 344994 - DNA, 666 bp, Artificial Sequence
  derived and/or modified sequence
atggaggacacacaggcgatcgactgggacgttgaggaggaggaggagacagagcagagctctgagtcacttaggtgtaatgtcgaacctgtcggacgtcttcacatattttcaggcgcacatgggccagaaaaagacttcccattgcatctaggaaaaaacgttgtgggccgcatgcctgattgttctgtcgcactgcccttcccgagcatttcaaagcagcacgccgagatagaaatcttggcttgggacaaagccccgatcttgagagattgtggctccctcaatggtacacagatcctgtcttcaagcctccccccccctcagacgagcctgctgccactctctcttagactcagactgcttggtgaggagcagatcgatccattgtctagactccttaagcaactgtccccacagcctctgtcatatcggctgcccccccctcagacctcattgagtccgttatctccccacctcggtcctctcggagaggagaagatcggccctctctctagacccctgaagcaactgtgcccccagccattatcctccagcttaccgccaccacagactaatctgtccccgctgtcgccacatctgggccctctcggtgccgggcaaataggccccttatctaggcccctgaaccagctgtctttatag

SEQ ID NO: 344995 - DNA, 666 bp, Artificial Sequence
  derived and/or modified sequence
atggaggatactcaggccattgattgggacgttgaagaggaggaagagacagagcaatcaagcgagtcgctgcgctgtaacgtggagcccgtgggcagactgcatattttctctggagcacatggccctgagaaggacttccctctccacctaggaaaaaacgtcgttggacgtatgccagattgttccgtggcgctgccgttcccctctatcagcaagcagcatgctgaaattgagattcttgcctgggataaagctccaatactacgtgattgcggttcgttgaacggtactcaaattctctcctctagtctcccccctccccagactagcttgcttcccttgagcctgaggctgcgcttattaggcgaagaacagatcgatcctctctctaggttgttaaagcaactgagccctcagccactttcgtacagattgcctcctcctcaaacgtcccttagccctctttctccacacctgggtcccctcggtgaagaaaagatcggaccactctcacgacccctcaagcaactctgccctcaaccgttatcttcctccctgccgcccccccaaacgaacttgagtccactctcaccccacctggggccactgggcgcaggccaaatcggtcccctgtccaggcccctgaatcagcttagcctgtag

SEQ ID NO: 344996 - DNA, 738 bp, Artificial Sequence
  derived and/or modified sequence
atggaggacacacaagccatcgactgggacgtggaggaagaggaagagacagagcagtcctcggaatctctccggtgcaacgttgagccagtgggtagactgcacattttttccggcgctcatggaccagagaaagactttcccctgcatctgggtaaaaacgtcgtggggagaatgcccgactgtagcgtagctctgccatttcctagtattagcaagcaacatgcggaaattgaaatcttagcatgggataaggccccaatcctgagggactgcggaagtctgaatggcacacaaattctccgccctccgaaagttctgtcacctggggttagccatcgattgcgggaccaggaactgatcttatttgctgatctgctgtgtcaatatcataggctggatgtctcattgccttttgtatcacgcggaccacttaccgtggaagagacccctcgggtccaaggcgagacacaaccacagcgattattgttggctgaggactctgaggaagaggttgacttcctgagcgagcggaggatggttaagaagagcagaactacgtcttccagcgttatagtgcctgaatcggatgaggagggacacagccccgttttgggtgggctgggccccccgtttgccttcaatcttaatagcgatacggacgtggaggagggccagcagcccgctaccgaggaggcttccagcgccgccaggaggggtgccactgtggaggcttag

SEQ ID NO: 344997 - DNA, 666 bp, Artificial Sequence
  derived and/or modified sequence
atggaggacacccaggccatcgactgggatgtggaggaggaggaggagacagagcagagcagcgagagcctgcgctgcaatgtggagcctgtgggccgcctgcacatcttcagcggggcccacggccctgagaaggacttccccctgcacctgggcaagaatgtggtgggccgcatgccagactgcagcgtggccctgcccttccccagcatcagcaagcagcacgccgagattgagatcctggcctgggacaaggcccccatcctgcgggactgtggcagcctgaatggcacccagatcctgagcagcagcctgcccccaccccagaccagcctgctgcccctgagcctgcggctgcggctgctgggggaggagcagattgaccccctgagccggctgctgaagcagctgagcccccagcccctgagctaccgcctgcccccaccccagaccagcctgagccccctgagcccccacctgggccccctgggggaggagaagattggccccctgagccggcccctgaagcagctgtgcccccagcccctgcggagcagcctgcccccaccccagaccaacctgagccccctgagcccccacctgggccccctgggcgccggccagatcggccccctgagccggcccctgaaccagctgagcctgtag

SEQ ID NO: 344998 - DNA, 921 bp, Artificial Sequence
  derived and/or modified sequence
tgacacgtgggcggcaccaaggacagcgaggacaactacggcgactcggaagatcttgaccttcaggccacacagtgttttctggagaaccagggcctggaagccgtgcagtctatggaagacgagccaacacaggcctttatgctcacaccaccccaggagctgggaccctcacactgtagcttccagacaactggtctactgaactgtaaaatgcctcccgccgagaaggcaagcagaattagagctgctgaaaaagtctcccgaggcgaccaagagtcaccagacgcgtgtctgcctcctacagtccccgaggcaccagcacctccccagaagcctttaaacagtcaatctcagaagcacctcgccccgccccctctgctctcacccttgctgccctccattaagccaaccgtccgaaagactcggcaggatggaagccaggaggcacctgaagctccccttagtagcgaactcgagccttttcacccgaagccaaagattcgcacccgcaagagctcaaggatgacgcctttccccgccaccagcgcagcaccagaaccacacccttcaacgtccactgcacagcctgttactcccaaacccacctcgcaggcgacccgttcccgaaccaatagatcttcagtgaagactccagagcccgtggttcctacagctcctgagcttcagccatccacaagcacggaccagccggtgacaagcgagccaaccagtcaggtaacaaggggaagaaagagccggtccagcgtgaaaactcctgaaaccgttgtaccaactgccctggagctccaaccgtccacttccacggacagacccgttacaagcgagcccaccagccaggcaactcgtggtagaaagaataggagctccgtgaagacacctgaacctgtcgtgccatag

SEQ ID NO: 344999 - DNA, 921 bp, Artificial Sequence
  derived and/or modified sequence
tgacacgtgggcggcaccaaggacagcgaggacaactacggcgactctgaggacctcgatctacaggccacccagtgctttctggagaatcagggattagaggcagtgcagagcatggaagacgagccaacgcaggcgttcatgctcacgccaccccaagaactgggtccaagtcactgctcgttccagactactggacttttgaactgcaagatgcctccagccgagaaggcctccagaattagggccgcggagaaagtgtctcggggcgaccaggaatctcccgatgcctgcctgcctcccacagtacctgaagctccggctccacctcagaagcctctgaattctcaaagtcagaaacatctcgctccaccaccactactgtcccctctcctgccttccattaagccaacagtgcgcaagacaagacaggacggtagccaggaagcccccgaggcaccactttccagcgagctggagccttttcaccctaaaccaaagattcggactaggaaatctagcaggatgactcctttcccggctacctccgcagccccagaacctcacccctcaacttcaactgcccaaccagtgacccctaagcccacgtcccaggccactagatctagaaccaatcgctcctctgtaaagacgcccgagcccgtggtccctacagcgccggagctgcagccatccacaagtaccgatcagcctgtgacaagcgagccgacctcccaggttactagggggagaaaatcccggagctcagtgaaaacccccgaaaccgtggtgccaactgctctagaattgcaacccagtacaagtaccgaccgaccagttacatctgaacctacctcccaggccactagggggagaaagaaccggagttcagtcaagactcctgaaccggtggtaccctag

SEQ ID NO: 345000 - DNA, 921 bp, Artificial Sequence
  derived and/or modified sequence
tgacacgtgggcggcaccaaggacagcgaggacaactacggcgactcagaggatctggacctgcaggccacccagtgttttctcgaaaatcaggggctggaagccgtacagagcatggaagacgaacctacacaggccttcatgcttacccccccacaagagctcggaccctcacactgctcattccagacaaccggattactgaactgcaaaatgccaccagcagaaaaggcatcacgaattcgtgccgctgagaaagtgtccagaggggaccaggaaagccctgatgcttgcctcccccctaccgtacctgaagctccagcacccccccaaaaaccgctaaactctcagagccaaaaacacttggctcctccgccgctccttagccctctgctgcccagcatcaagcccaccgtgaggaaaacgaggcaggacgggtctcaggaagccccggaggcgcctctgtcatctgaactggaacccttccacccaaagccaaaaattagaactcgaaagtctagtagaatgacgcccttccctgccacttcggccgccccagaaccgcatcccagcacctctactgcccaacccgtaacacctaaaccaacatctcaggccaccagatcacgcactaaccggtcctcagttaaaacacctgaacctgtggttcctacagctcctgagctacagcctagtacttccaccgatcagcctgtgacaagcgagccaacatcccaggtcacccgggggcgcaagagcaggagtagcgtcaagacccctgaaaccgtcgttccaaccgccttggagctccagcccagcacatcgacagaccggccagtgacgtccgagcccacgtctcaagccacccgtggtagaaagaatcgctcatccgtgaaaacgcctgagccagtggttccatag

SEQ ID NO: 345001 - DNA, 921 bp, Artificial Sequence
  derived and/or modified sequence
tgacacgtgggcggcaccaaggacagcgaggacaactacggcgacagcgaagaccttgacctgcaagcaacccagtgctttctggagaatcaggggctggaagccgtgcaaagtatggaggacgagcctactcaggctttcatgctgactcccccccaggagctcgggccgagccactgtagctttcagacgacaggactcctgaactgtaagatgcctcctgcagaaaaagcttcacggataagagccgcagagaaggtttccagaggcgatcaggaatcccccgacgcctgcctgcctcctactgtaccagaggcgcccgccccacctcagaagcctcttaatagccagtctcagaagcacctagcccctccaccattgttgtctcctttgctcccttccatcaagcccactgttcgcaagacgaggcaggacggtagccaggaggcacccgaggccccactttcatcagagctagaaccatttcatccaaaaccaaagataagaacgcgtaagtcatctcggatgacaccctttccagcgacatccgccgcgccggagccccacccctccacctctaccgctcagcctgttacacctaagccaacttcacaagccacaaggtctagaactaacagatcctctgtcaaaacccctgagccagtggtgcccacggctcccgaattacaaccatccactagcacagaccaaccagtgacatcagagccgacaagccaggtgactcgcgggcgtaaatcacgctcgagtgtgaaaacacccgagactgtggtgcccacagccctagagttgcagccctctacaagcaccgatagacccgtgacttcagagcctacttcacaagccactcgagggaggaaaaacaggagctcggtgaaaactcctgaacctgttgtcccctag

SEQ ID NO: 345002 - DNA, 738 bp, Artificial Sequence
  derived and/or modified sequence
atggaggacacccaggccatcgactgggacgtggaggaggaggaggagaccgagcaatccagcgaatcccttagatgcaacgtagagcctgtaggacgcctgcacatcttcagtggagctcacggccctgagaaggattttccactgcatctgggtaagaacgttgtgggccgcatgcccgattgctccgtggcgctgccctttccatcaatttccaagcagcacgccgaaattgagattctcgcatgggataaagcccctattctgagagattgcggatcactcaacggaacccagattcttaggcccccaaaggtgctgtctccaggggtctctcacagactgcgggaccaggaacttattctgtttgctgatctgctgtgccaataccatcgccttgacgtgtctttgccattcgttagtcgtggcccactgactgtcgaggagaccccgagagtccaaggcgagacacaaccccagcgcctgctgttggccgaagattcagaagaggaggtggacttcctaagtgagcggcgtatggtaaagaaatcccgcactacctcctcttctgtgatagtgcctgaatctgatgaagaaggtcattcacctgtgctgggtggacttgggccccccttcgctttcaaccttaacagcgacactgacgtcgaggagggtcagcagccagctacagaagaagccagctccgctgcaaggagaggcgcaactgtagaggcatag

SEQ ID NO: 345003 - DNA, 921 bp, Artificial Sequence
  derived and/or modified sequence
tgacacgtgggcggcaccaaggacagcgaggacaactacggcgactcagaggatctggacttgcaggccacacagtgcttcctggaaaatcagggtcttgaggccgtgcagagcatggaagacgaaccaacccaggcctttatgctaacccctcctcaggagctcggaccttcacattgtagcttccagactaccggcttgcttaattgcaaaatgcctcccgccgaaaaggcaagcaggattcgggctgcggaaaaggtatccagaggggatcaagagtcccctgacgcttgtttgccgcctactgtgcctgaggcacccgcgcccccccagaagccgttgaattctcagagccaaaaacacctcgcgccccctcccctactgagtcccttgctcccatctataaagcctacagtgcgcaagactcgccaagacggatcacaagaagcacccgaggcccctctgtccagtgagctagaaccattccaccccaaacctaagatccgaacacgcaagtcttcacgcatgacaccatttccggcaacgtctgcagcgcccgaaccccatcccagtacctccacagcgcagcccgtgacaccaaagcctacatctcaagcaaccagatcccgaaccaacaggagctccgtgaaaactcccgaacctgttgtgcccaccgcccccgagttgcagcctagcacctcaacagatcagcctgtgacaagcgaacctacctcccaggttactcgcggcaggaaatctaggtcgtccgtaaaaacccccgaaaccgtcgtgccaacagctctggagctgcagccttctacgagtactgacagaccagttacctccgaacctacctcacaggccaccaggggacgaaagaaccgtagctctgtgaagacgcccgagcccgtcgtcccctag

SEQ ID NO: 345004 - DNA, 921 bp, Artificial Sequence
  derived and/or modified sequence
tgacacgtgggcggcaccaaggacagcgaggacaactacggcgactccgaggacctagatctccaagctactcagtgttttctcgagaatcagggcctagaggccgtgcagtccatggaggacgagccaactcaggcctttatgttgacacctccccaggagctcggccccagccactgttccttccagacaactgggctgcttaactgtaagatgccgcccgctgaaaaagcatctcgcatcagggcagcggaaaaagtatctcgtggcgatcaggaatcgcctgatgcctgcctgccacctactgtcccagaagccccagctccaccacagaaaccactgaattcgcagagtcaaaaacaccttgctcctcccccgcttctgtcccctctgctgcccagtatcaaacccacagtgcgtaaaactcggcaagatgggagccaggaggctcccgaagctccacttagcagcgagttagagcctttccatcctaagcccaagatcagaacaagaaagagtagccggatgaccccctttccagcgacttctgccgcccctgagccacacccctctaccagcacagcacagccggttacaccaaagccaaccagccaggcaacacggagtaggaccaatagatcttccgtgaagacgcccgagcctgtcgtgcctactgcacctgagctgcagccttctacctccacagatcaacccgtgacgagcgaacctactagccaagttactcgcggtagaaaaagtagatcatcagtaaaaactcccgaaacagtagtacccactgccttggaactgcaaccaagcacaagcaccgacagaccagtcaccagcgagccaacgtctcaggccacaaggggccgcaagaatcggagctccgtaaagacacctgaaccagtggtgccatag

SEQ ID NO: 345005 - DNA, 921 bp, Artificial Sequence
  derived and/or modified sequence
tgacacgtgggcggcaccaaggacagcgaggacaactacggcgacagtgaagacctggacctgcaggctacccaatgctttctggagaaccaaggcctggaagctgtgcaatctatggaggatgaacctacacaggccttcatgctgacacctcctcaggagctgggtccatctcattgtagctttcagacgaccggcttactcaattgcaagatgccgcctgccgaaaaggcttcccgaatcagagcggccgagaaggtgagccgtggtgatcaggagtcgccagacgcgtgcttgccgccaacagtacccgaagcgcccgcgccgccacagaaaccactcaatagccaaagtcaaaagcaccttgcccctcctccactgctgtctccacttttgccttctatcaagcctacagtcagaaagaccagacaggatggatcacaggaagccccagaagcaccgttgtcaagcgagctcgaaccgtttcacccaaaacctaagattcgcacgaggaagtcatccagaatgacacctttccccgcgacttcggctgcccccgaaccccatccaagtactagcacagcacaacccgtaacccctaagccaaccagccaggcgacccgatcaagaacaaaccggagtagtgtgaaaactccagagcctgtagtgcctactgcacctgagctgcagccctctacctctaccgaccagccagtgacatctgaacccacaagccaggtgacgcgaggcaggaaatcccgcagcagcgtgaagactcctgaaacagttgtccctactgctctggagctgcagcccagcaccagcaccgacagacctgtcacttccgaaccaacgtcccaggctacccgcggcaggaaaaaccgctccagcgtgaaaacccctgagcctgtcgtgccctag

SEQ ID NO: 345006 - DNA, 735 bp, Artificial Sequence
  derived and/or modified sequence
atggaggacacccaggccatcgactgggacgtggaggaggaggaggaaacggagcagagctcagagtcgctgcggtgtaacgtagagcctgtagggcgtctgcacatattctctggcgcccacgggccagaaaaggacttccccctgcacctcggcaagaatgtggtgggacgcatgcctgattgcagcgttgcactgccctttcctagtataagcaagcagcacgccgaaatcgaaatccttgcctgggataaggcccccattctccgagattgtggcagtctcaacggcacacagatactccgtcccccaaaagtcctcagtcctggggtgtctcatcgcctaagagaccaagaactgatcctgttcgccgatctgctctgtcagtaccatcgcctggatgtgagcttgccctttgtatcacgggggccgctaacagtcgaagagacccccagagtgcagggagaaacacagcctcagagactgttgctggccgaagattctgaggaggaggtggacttcctctctgagcgccggatggttaagaagtcccgtacaacctccagctctgtcatcgtgcctgaatccgacgaagagggccactcacccgtgctgggaggactcgggcccccttttgctttcaacctaaacagcgatacagacgttgaggagggccaacaaccacaccggggaggactgctaagttgccaaaaacgttgccactgtcggggctag

SEQ ID NO: 345007 - DNA, 735 bp, Artificial Sequence
  derived and/or modified sequence
atggaggacacccaggccatcgactgggacgtggaggaggaggaggagacggagcaaagcagcgaaagcctccggtgcaacgtggagcctgttggccggctccatatattctctggggcccacgggccagaaaaagatttcccattacatctcggaaagaacgtcgtgggtcggatgccagactgttctgtagctctgcctttcccctccatatctaaacagcacgccgagattgagattctcgcttgggacaaagcgccaattctcagggactgtggctctttgaatggtactcagatcttaaggccaccaaaggtgctctctcccggcgtgtctcaccgcttgcgagatcaggagcttattctttttgccgacctgctctgccaataccatagacttgacgtgtctcttccttttgtgagtcggggtcctctgactgtcgaagagacgccacgggtccaaggggaaactcagccccaaaggctcttactggccgaagacagcgaggaagaggtcgatttcttgtctgagcggagaatggtgaaaaagtccaggacgacttcttcctctgtgattgtgcctgagtcagatgaagagggccattcccctgttctgggcggactcggtccccccttcgccttcaatcttaatagtgatactgacgtagaggagggacagcaacctcaccgaggcggcctcttatcctgtcagaagagatgtcactgccgtgggtag

SEQ ID NO: 345008 - DNA, 735 bp, Artificial Sequence
  derived and/or modified sequence
atggaggacacccaggccatcgactgggacgtggaggaggaggaggagactgaacaatcgtcagagagccttaggtgcaacgtcgaacctgtagggcgcctgcacattttttctggagcccatggccctgaaaaggatttcccgcttcacctgggcaagaacgtggtcggtcgaatgccggactgtagcgtggccctgccctttccgagtatctctaaacagcacgcagagatagagatcttggcctgggataaagcccccattctccgggactgcggcagcctcaacgggacccagatccttcgtccccctaaggttctgtctcccggggttagtcaccgactgcgggatcaagagctcatcctcttcgccgacctgctttgccagtatcacaggttggatgttagccttccctttgtgtctcgggggcccctaacggtcgaagagactccacgagtacaaggcgaaactcagccacagcgcttgttactggctgaggatagcgaggaggaagtggactttctgagcgaacgtagaatggtaaaaaaaagcaggactacttcatcctccgttattgtgcccgagagtgacgaggaggggcattctcctgtgctgggcgggttaggacccccttttgctttcaatcttaactcggacactgacgtggaagagggccaacagcctcatcgcggcgggctcctctcatgccaaaaaaggtgccattgtagaggctag

SEQ ID NO: 345009 - DNA, 735 bp, Artificial Sequence
  derived and/or modified sequence
atggaggacacccaggccatcgactgggacgtggaggaggaggaggaaacagaacagagtagcgagtcattacgatgcaacgtggagcccgtcgggcggctgcacatcttcagcggagctcacggtccagagaaggatttccccctgcacctggggaagaatgtagtggggcggatgcctgactgctcagttgcactcccgttcccgtcaataagcaagcagcacgcggaaatagaaatcctggcttgggacaaagcaccgattctacgcgattgcggcagcctcaacggcacacagattctgcggccccctaaagtgctgtctcctggtgtgtctcaccgcctccgagaccaggagctgatcctgtttgccgatctgttatgccagtaccaccgcttggatgtgtctcttccattcgtgtccaggggtcctttgaccgtagaagagactccccgagtgcagggcgagacccagccacaacgcctgctcctggccgaggatagcgaggaagaagttgattttcttagcgagcgtagaatggtcaagaaatccagaacgacatcaagctctgtgatcgttccagagagcgatgaagaaggtcactcgccggtgctagggggactcggaccccccttcgcttttaaccttaactctgataccgatgtggaagaaggacagcagccgcatcgaggcggcctgctatcttgtcaaaaacggtgccactgtcgcggttag

SEQ ID NO: 345010 - DNA, 738 bp, Artificial Sequence
  derived and/or modified sequence
atggaggacacccaggccatcgactgggacgtggaggaggaggaggaaacagaacaaagtagtgagtcacttcgttgtaatgttgaaccagtcgggcgcttgcacatcttttctggagcccacggtcctgaaaaggacttccctctgcacctggggaaaaatgtggtagggagaatgcctgattgctcagtcgcactgcccttcccctcaatttcgaaacaacacgctgagattgaaatactcgcgtgggataaggctcctatcttgagggactgcggctccttaaacgggacccagatacttcggccacctaaagttctcagccctggtgtgtcacacaggctccgggatcaggagctgattctttttgcggatctcttatgccagtaccaccgactggacgtttcactgcctttcgtctctagaggtcccctgacagtggaggaaacaccaagggttcaaggcgagacacagccccagcggctcttgctcgcggaagactctgaggaagaagtagatttcttgtctgaaaggcggatggttaaaaagtctcggaccacctcttcttctgtcattgttccagaatcggatgaggagggacattctcccgtcctgggcgggttaggcccccctttcgcttttaaccttaactctgacactgacgtggaggaaggtcagcagccagcaacagaggaggcgtccagcgccgccagacggggcgcgactgtggaagcctag

SEQ ID NO: 345011 - DNA, 738 bp, Artificial Sequence
  derived and/or modified sequence
atggaggacacccaggccatcgactgggacgtggaggaggaggaggaaacggaacaatcctccgaaagccttcgatgcaacgttgaaccagtcgggcgattgcacatcttttctggcgcgcatgggccagaaaaggactttccactgcatctggggaaaaatgtcgtcggtcgaatgcccgactgctctgtggctttaccatttccctctatcagtaaacagcacgccgaaatagaaatcctcgcatgggacaaagcccccatacttcgcgattgcggtagtcttaatggtacgcagatcctgcgccccccgaaggtcctgtcgcccggtgtctcccatagattgcgggatcaggagctgatcctgttcgccgacctgttgtgccagtatcataggctcgatgtcagcctacccttcgtttcccgaggaccgctcaccgttgaggaaacgccacgcgttcagggagagacgcagccacagaggctgcttctggccgaggactcggaggaagaagtagacttcctgagcgaacgaaggatggttaagaagtcccgcaccacgtcctctagcgtgatagttcccgaaagtgatgaagaaggacattctccagtgctgggcgggctggggcctccattcgctttcaacctgaactcagataccgacgttgaagaaggacagcagcccgctacagaggaggcctctagcgctgccagaagaggcgctactgtcgaggcatag

SEQ ID NO: 345012 - DNA, 738 bp, Artificial Sequence
  derived and/or modified sequence
atggaggacacccaggccatcgactgggacgtggaggaggaggaggagacagagcagagttctgagtctttgcgatgcaacgtcgagcctgtgggtaggctgcacattttctcaggagcacatgggccagaaaaggatttccccctacatcttgggaagaacgtggtcggccggatgcccgattgcagcgtggctctgcctttcccttccatctctaagcaacatgctgaaattgagattcttgcgtgggacaaggctccgatcctacgggactgtggcagccttaacggaacccaaatccttcgaccgccaaaggtgctgtccccaggcgtgtcccacagactgcgcgaccaggagctgatccttttcgccgatctcttgtgccaataccacaggctggacgtttcactgcccttcgtgagccgagggcccttgacagtcgaggaaacgccacgggttcaaggggaaacccagcctcagcgcttgttgctggccgaagattccgaggaagaagtagatttcctttctgagcgaagaatggtgaagaagtcccgcacaaccagctcttccgtcatcgttcccgaaagcgatgaggaagggcacagtcctgtgctgggcgggttgggaccacccttcgctttcaatcttaactccgacaccgacgttgaggagggacagcagcctgccactgaagaagccagcagcgcagccaggagaggcgccacggtcgaagcctag

SEQ ID NO: 345013 - DNA, 666 bp, Artificial Sequence
  derived and/or modified sequence
atggaggacacccaggccatcgactgggacgtggaggaggaggaggagacagaacagagttccgaatctttacggtgcaacgttgagcctgtgggacggctgcatatcttcagcggtgcccacgggcctgaaaaggattttcctcttcatttgggcaagaacgtcgtcggaagaatgcccgattgttccgtcgctcttccttttcccagcattagtaaacagcacgctgagattgaaatacttgcttgggacaaggccccgattttgcgcgactgcggctccctgaacgggacacaaatactgtcttccagtctgccaccaccacagacgtccctccttcctctctccttaaggctcaggctactcggcgaagagcagatcgaccccctgagccgtcttcttaaacaactctccccacagccacttagctaccggctacccccacctcagacttccctctccccgctgtcacctcacttgggaccactgggcgaggaaaagataggaccgctttcccggccactaaaacagctctgcccacagcctctatcgtctagtctgccacctccccagaccaacctgagccctctatcccctcaccttgggcccctgggggccggccaaattggcccgttgagccgccctctgaaccaactatccctgtag

SEQ ID NO: 345014 - DNA, 666 bp, Artificial Sequence
  derived and/or modified sequence
atggaggacacccaggccatcgactgggacgtggaggaggaggaggaaaccgagcagagtagcgaatcactaagatgcaacgtcgaaccagtcggacgtctccacatttttagcggtgcccacgggccagaaaaagacttccccttgcatctaggcaagaacgtagtgggccgcatgccagactgttctgttgcgctgccctttccctcaattagcaagcagcacgctgaaatcgaaatcctggcttgggataaagctcctatcctgagagactgcgggtcactgaatggcacacaaatcctgagcagcagcttaccaccaccacagacttcgttgctgcctctctccttgcgcttgcgcctcttgggggaggaacaaattgatcccctgagcagattgcttaagcagttgtcccctcagccactttcctaccggctgcctcccccacagacttcgctgagcccgctttctccacaccttgggcctctgggggaggagaagataggtcctctgtctcgtccactgaaacagctctgtccccagcctctgtccagttcattgcctccaccccagaccaatctgagtccactatccccccatctgggacccctcggcgctgggcagataggcccgctttcccgccccctgaaccaactgtctctctag

SEQ ID NO: 345015 - DNA, 738 bp, Artificial Sequence
  derived and/or modified sequence
atggaggacacccaggccatcgactgggacgtggaggaggaggaggagaccgagcagtcttcagaaagtctacgctgtaatgtggagccagtcggaaggctacatatttttagcggagcccacggcccagagaaagactttccactacacctgggaaagaatgtggtgggtaggatgcccgactgtagcgtcgccttgcccttcccaagcataagcaaacagcatgccgagatcgaaatccttgcctgggacaaagctcctattctgcgagattgtgggtcattgaacgggacccagattcttaggccgcccaaagtgctaagtccgggcgtgagtcacagactgagagatcaagagctcatactatttgctgacctcctctgtcagtatcatcgtctggacgtttccctccccttcgtgagtagagggccgctaactgtggaagaaacccctagagtgcaaggggagacacagcctcagaggctgctgctggccgaggatagtgaggaggaggttgactttctttcagaacggagaatggtcaagaaaagcagaaccacctctagttctgtgattgtcccagagtcagatgaagaaggccactccccagtgctcggaggcctgggacccccatttgcctttaacctgaattccgatacagacgtcgaagagggccagcagccggcaacggaagaggcctcaagcgcagcccggcgtggcgcaactgttgaggcttag

SEQ ID NO: 345016 - DNA, 735 bp, Artificial Sequence
  derived and/or modified sequence
atggaggacacccaggccatcgactgggacgtggaggaggaggaggaaaccgagcagtcgtccgaaagcctgcggtgcaacgtggaacctgtcggcagattacatattttcagtggggcgcatggtcccgagaaggacttcccactccaccttggaaaaaatgttgttggcaggatgcccgactgtagcgtcgcactgcccttcccatcaatctccaagcaacatgcagaaatagaaattctcgcctgggataaagcacctatccttagagactgtggatctctgaacgggacccaaattctcaggccgcccaaggtgctgagcccaggcgtgagtcatagattgcgtgaccaggagctgatcctgttcgctgacctcctgtgtcagtaccaccggctggatgtgtctctgccgttcgtgtctagggggccactcaccgtggaagagactccccgggtgcaaggagaaacacagccccagcggttgctgcttgccgaagatagcgaggaggaggtggactttttgagtgagcggcgtatggttaagaagtcccgtacaacctctagcagcgtcattgtacccgagtcagacgaggagggacactctcctgtgctcggtgggctgggacccccttttgcattcaacctgaactctgataccgacgtggaagaaggccaacagccgcaccgaggtggactgctgagctgtcagaagaggtgtcattgtcgcggttag

SEQ ID NO: 345017 - DNA, 666 bp, Artificial Sequence
  derived and/or modified sequence
atggaggacacccaggccatcgactgggacgtggaggaggaggaggagaccgagcagtcatcagaaagtctgcgctgcaacgtggagcctgtgggcaggttgcacatcttctctggagctcacggccccgagaaggattttcctcttcaccttggcaaaaatgtcgtgggtcggatgcccgactgctctgtcgctttaccctttccatccatctccaaacagcatgccgagattgaaatactagcgtgggataaggctccaatcctgcgggattgcgggtcgcttaatggtacacaaatcctctcctcgtcgctgccaccgccacagacgtcccttctccccttgagcctgcgtctccgtctgctgggcgaagaacagatcgaccccctgagtcgcctgctgaaacagctgtcaccccagcctctgagttaccgactaccaccccctcaaacatcattgtctcccctctcgcctcatctgggccccctgggtgaagagaagattggccctctgagtagacctctgaaacagttgtgcccccaaccactgaggtcttccctgcccccacctcaaactaatctgtcccccctttcccctcacctcggtcctctgggggctggtcagataggaccactgtctcgtcctctgaaccaattaagcctatag

SEQ ID NO: 345018 - DNA, 666 bp, Artificial Sequence
  derived and/or modified sequence
atggaggacacccaggccatcgactgggacgtggaggaggaggaggaaactgaacaatcctccgagagcctccggtgcaacgttgaacccgtgggtaggctgcacatcttctcgggcgcccatggccccgaaaaggacttccctctgcacttaggcaaaaacgtggtgggaagaatgcccgactgttcggtggccctgcccttcccaagtatctcgaaacaacacgcagagatcgaaatcctcgcctgggacaaagcccctattctgagggattgcggcagcctgaatggcacccagatcctgtcttctagcctcccgcccccacaaacatccctgctgcccctgtctctccgcctacgactgttgggcgaagaacagatcgaccctttgtctaggcttttaaaacagctgagcccccagccactcagctacagactgccgcctcctcagacttccctgagccctctgagtccacatctgggaccccttggtgaagagaagattggtccactgagcagaccgctgaagcagctctgcccccagcccctgtcatcatcactcccacccccgcaaacaaatttatctcctctgtctcctcacctgggccctctgggggcgggtcagatcggcccactgagccggccactgaatcagcttagtctgtag

SEQ ID NO: 345019 - DNA, 738 bp, Artificial Sequence
  derived and/or modified sequence
atggaggacacccaggccatcgactgggacgtggaggaggaggaggaaaccgagcagagttctgagtcactgaggtgtaacgtggagccagtcggccgcctacatatttttagcggggcacacgggccagaaaaggatttccccctgcatttggggaagaacgttgtagggcgcatgcccgactgctctgtggcactgccctttccctccatatctaaacaacatgctgagattgaaatcctcgcttgggacaaagcgcctatcctccgcgattgtggatcactcaacgggacgcagattctccggccacccaaagtgctcagccctggcgtgtcccacagacttcgggatcaagaactcatcctgttcgccgatcttctctgccagtaccatagattggacgtgtccctgccttttgtctccaggggccccctgacggtcgaagaaacacctcgtgtgcagggcgagactcagccccagcgcctcttgcttgccgaggatagtgaagaggaggtggatttcctcagcgaaaggcgaatggtgaagaaatctcggacaacttcttcatccgtgatcgtccccgaatcagatgaagaaggacattcacctgtcctgggcgggcttgggccacctttcgccttcaaccttaactctgacactgacgtggaagaagggcagcagcccgcgaccgaggaggcctcatccgctgcccgaagaggcgccactgtggaagcctag

SEQ ID NO: 345020 - DNA, 735 bp, Artificial Sequence
  derived and/or modified sequence
atggaggacacccaggccatcgactgggacgtggaggaggaggaggaaacggagcagtctagtgagtcactgagatgtaacgtggaacccgtggggaggctccatattttcagtggagctcatggaccggagaaggattttccactccatctcggaaagaatgtggtaggacgcatgcctgactgctccgtggcactaccttttccgagcatttccaaacagcacgcagagatagaaatcctggcctgggataaagctcctattttgcgagactgtggatccctcaacggaacccagattctgcgcccaccaaaagtactgagtccaggagtcagccaccgtcttcgggaccaagaactaattctctttgccgacttgctgtgccagtaccaccggctggacgtttcacttccattcgtttccagggggcccctcaccgttgaggaaacgccccgggtccaaggcgaaacacagccgcagaggcttctgctagccgaggactcagaggaagaagtggattttctttccgaaaggaggatggtaaagaagagtaggacaacctcttcatccgtcatcgtgcctgaaagtgatgaagaaggacatagccccgtgctgggtggattgggccccccatttgcgttcaacctaaatagtgataccgatgtcgaggagggacagcagcctcatcgcggaggcttgttaagctgccagaagcggtgccactgccgtgggtag

SEQ ID NO: 345021 - DNA, 735 bp, Artificial Sequence
  derived and/or modified sequence
atggaggacacccaggccatcgactgggacgtggaggaggaggaggagacggaacagagcagcgagtccctaaggtgcaacgttgagcctgtggggcgtctgcatatttttagcggagcacatggtcctgagaaggacttccctctgcacctcggtaagaacgttgtggggaggatgccggactgttcggttgcattgccctttcctagcatttccaaacagcacgcggagatcgagatacttgcctgggacaaggctcctatactgagggattgtggttctctcaatggaacacagattttgagaccacccaaggtgttgtctcccggcgtgtctcatcggcttcgcgatcaagagcttattctttttgctgacctgctctgccaataccatcggctggacgtttcgttgccgtttgttagccgcggacccctcactgtagaagaaactccaagagtgcagggcgaaacgcaacctcagcgactcctgctggcagaagactctgaggaagaagtggacttcctgagcgagcgtcggatggttaagaagtccaggaccacaagtagcagcgtaattgtgccagagtccgacgaagagggtcattccccagtccttggcggtttgggccctccatttgctttcaatctcaactctgataccgacgttgaggagggacagcagccacaccgcggcgggcttctatcctgccaaaagaggtgccactgccgtggctag

SEQ ID NO: 345022 - DNA, 666 bp, Artificial Sequence
  derived and/or modified sequence
atggaggacacccaggccatcgactgggacgtggaggaggaggaggagacagagcagtcttccgaatctctgcgctgtaatgtagagccagtgggtcggctgcacattttcagcggcgcccatggccctgagaaggatttccctctacatctggggaagaacgttgtgggcagaatgccagactgttctgtggcactaccctttccatcaatcagcaagcagcatgctgagatcgagatcctcgcatgggacaaagctcctatattgagggattgcggcagtctaaatggaacccagattctcagctcctctctgcccccgcctcagacttcactgctgcctctgtcactgaggttgcgcctcttaggcgaagagcaaattgatccattgagccgcctgcttaagcagctcagcccgcagcctctgtcttaccgactgcctccaccacaaacgtctcttagcccgctctcccctcatctgggaccccttggggaggaaaaaatagggccgctgtccaggcccctgaaacagctttgtcctcagccgctcagcagttcccttccaccaccccagacaaatctgtctccgctgagcccccatttgggcccactgggtgctggccagatcgggccactcagcagaccactgaaccagctgtccttgtag

SEQ ID NO: 345023 - DNA, 666 bp, Artificial Sequence
  derived and/or modified sequence
atggaggacacccaggccatcgactgggacgtggaggaggaggaggaaaccgagcaatcttcagaaagcctgaggtgcaatgtagaacccgttgggcggctccatatttttagcggggcccatggccctgagaaggattttcctttacacttaggcaagaacgttgtgggaagaatgccagactgcagcgttgccctgccgtttccgagcatttccaagcaacacgccgaaatcgaaatcctggcttgggataaggcgcctatcctgagagattgtggttctctgaacggcactcaaatcctgagtagctcactgccaccacctcagaccagccttctccctttatcattgcggttgcgcttactcggtgaggaacagatcgatcccttatcgcggcttttgaaacagttgtcgccacagcctctcagctatcggctccccccacctcagacctctctgagccctctctctccccacttagggccgctgggcgaggagaaaattgggcccctctcacgacctctgaagcagctgtgtccgcagccgctcagcagctcactgcctccgccacagactaatctcagccctctctccccccacctgggtcctctgggggcgggtcagattggaccgctgtccaggcctctcaaccaattatctttgtag

SEQ ID NO: 345024 - DNA, 738 bp, Artificial Sequence
  derived and/or modified sequence
atggaggacacccaggccatcgactgggacgtggaggaggaggaggaaacagagcaaagctccgaaagcttacgctgtaacgtggaacccgtgggcaggttgcatatcttcagcggcgcacacgggcccgaaaaagatttcccactccaccttggaaaaaacgtggttggcagaatgcctgattgtagcgtcgcactgccattcccaagtatttctaagcagcacgcagagatcgaaatcctggcatgggataaagcacctatcttgcgcgactgcgggtctttgaatgggacacagatactgaggcctcctaaggtgctgtcacctggagtgagccacagacttagggatcaagagcttattcttttcgctgatctactgtgtcagtaccatagactggacgtaagcttgccatttgtctccaggggccctttgactgttgaagaaactccccgcgtacagggtgaaactcaacctcaacgacttctgcttgctgaagactcagaggaggaggttgattttctctcagagcgccggatggtgaaaaagagtagaacaacgtcttcttctgtcatcgtgcccgagtccgatgaggaaggccattcacccgttctgggtggcctcgggcccccatttgcctttaacctcaactctgacacagacgtagaagaagggcagcagcccgcgacagaggaagctagcagtgccgctagacggggcgccacagtggaggcttag

SEQ ID NO: 345025 - DNA, 921 bp, Artificial Sequence
  derived and/or modified sequence
tgacacgtggggggaacaaaggatagcgaggataactacggcgacagcgaggaccttgatctgcaagccactcagtgttttctcgaaaatcagggtctggaggccgtccagtcaatggaagatgagccaacccaggcctttatgctgaccccccctcaggagctggggccaagccactgttccttccagaccacagggctgctaaactgcaaaatgccccctgcagagaaggcttccagaatcagagctgcagagaaagtttcacgcggagatcaggagtcccctgacgcctgcctaccccctactgttcccgaagctccagcaccacctcagaagcctcttaactcccagtcacagaagcatcttgctcctccccctttgctgagtccattactcccatcaatcaagcctactgtgagaaaaacccgccaggacggttcacaagaggcaccagaggcccctctttcgtcagaactggagcctttccaccccaaacccaagataagaaccaggaaatcttcccggatgaccccgttcccggctaccagtgcggctcccgagccacatccatctacctcgactgcccaaccagtgacccctaagcccaccagccaggctaccaggtctcgcaccaacagatcatcagtcaagaccccagagcccgttgtccctaccgctccggagcttcagcccagcacttccacggaccagcccgttacttctgagccaacctcccaggtgactcgtggacgcaagtcacgatcaagcgtgaaaactcctgagactgtggtccccaccgcgttagagctgcagccaagcacttccactgaccgtcccgtgacttcagaacctacctcacaggctactcggggaaggaagaaccggtcctcagtcaaaacgccagagccagtagtcccatag

SEQ ID NO: 345026 - DNA, 921 bp, Artificial Sequence
  derived and/or modified sequence
tgacatgtaggtggaacaaaggattccgaggataactacggggattccgaggacctggacttgcaagctacacagtgctttcttgagaaccagggtctggaagctgtgcagagcatggaagacgagcccacacaggccttcatgctcacaccaccacaggagctgggccctagccattgtagcttccagacgaccggcttattgaactgtaaaatgcctccagccgagaaagcctccagaattagggctgctgaaaaagtctccagaggagaccaggagtccccagatgcctgccttccccctaccgtgcccgaagcccctgctcctcctcagaaaccactgaatagtcagtctcagaaacacctggccccaccaccactgctctcaccattattgcccagcatcaaacctaccgtccgtaaaactcggcaggatgggtcccaggaagcccctgaggccccactctccagcgaactggaacctttccaccctaagcccaaaatccggacccggaaatctagccgcatgactccattcccagccaccagtgcagcccctgaaccccacccctccactagcacggctcagcccgtcacaccaaagccgactagccaagcgacacggtctaggactaataggtcctctgtcaagaccccagagccagtggttccgaccgcgccagaactccaacccagcacaagcaccgatcagcccgtgacaagtgagcccacttcacaggtcactaggggcagaaaatcgagatcgtccgtgaaaacaccagagaccgtggtgcctactgcattggaactacaaccctctacatcaactgaccgacccgtgacctcggagccaacctcgcaggcgacacgcggtcgcaagaaccggtctagtgtgaagaccccagagccggtagttccgtag

SEQ ID NO: 345027 - DNA, 921 bp, Artificial Sequence
  derived and/or modified sequence
taacacgttggcggtaccaaagactccgaagacaactatggcgactcagaggacttggatcttcaggccacacaatgcttcttagagaatcaggggttggaggcagttcagtcaatggaagacgaacctacacaggcctttatgctcacaccccctcaggaactgggcccatcccactgtagctttcaaacaacagggttactaaattgtaagatgccaccagctgaaaaggcctcccgtatcagggccgcagagaaggtcagcaggggtgatcaggaatctcccgacgcttgccttccccctaccgtgcccgaagccccagcccctccccagaaaccactgaacagccagtcccagaagcacttggcccctcccccactgttgtccccattactgccctctatcaagcctactgtgaggaaaacccggcaggacgggtctcaggaggccccagaggcacccctgtcttctgaactcgaaccctttcaccccaaacccaaaataagaactcgaaaaagctcgaggatgaccccattccccgcaaccagcgcggctccagagccccatccctctaccagtactgcccagcccgtaacccccaagcccacatcccaggccactcgttcaagaacaaataggtctagtgtcaagacaccggagccagttgttcccacagcaccagagctccagccctcaaccagtacggatcagcctgtgacgtctgaaccaacatcacaagtgacgcgcggacgtaagtcaagatcatctgtaaagacacctgaaactgtcgtgcctacagccctcgagttacagcccagcacttccacggatcgccctgtaacttcagagcccacttcacaggcgacccggggaaggaagaacagaagcagcgtcaaaacgccagagcctgtcgtcccatag

SEQ ID NO: 345028 - DNA, 921 bp, Artificial Sequence
  derived and/or modified sequence
tagcatgtcggaggaacgaaggacagtgaggacaattacggtgatagcgaggatctcgatcttcaagcgacccagtgtttccttgagaaccagggcctggaggcagttcagtctatggaagacgaaccgactcaagctttcatgttaaccccaccccaggaattaggaccaagccattgttcgttccagactacaggacttctgaactgcaaaatgccccctgccgaaaaagcaagtcgtattcgcgcagccgaaaaggtaagccgtggggatcaagagtcacccgacgcctgcctgcctccaaccgtacctgaagcccctgcacctccccagaagccacttaacagtcagtcacagaagcatctcgcaccccctcctctgttgagtcctctgctgcctagcattaagcctaccgtacggaaaacaaggcaggacggctcacaagaggcacctgaggcgccattaagctccgaactggagccattccacccaaagccaaagatcaggacacggaagtcaagccgcatgacccccttcccggctacaagcgcagctccagaaccacacccctccacatccactgctcagccagtaactcctaagcccacatcacaggcaacccggtcccgcaccaaccgctcaagcgttaaaactcctgagcctgtggttcctacagcccctgaacttcagcctagcacaagtaccgaccaacccgtgacctctgagccaacaagccaagtcacccgcggtcgcaagtcgcgaagttccgtaaagacacccgagaccgttgtgcccaccgctctcgaactccagccgtccaccagcaccgatagacccgttacaagtgagcctacttcccaggctacccgcggtcggaagaaccgcagctcagtgaaaacgcctgagcccgttgtgccttag

SEQ ID NO: 345029 - DNA, 738 bp, Artificial Sequence
  derived and/or modified sequence
atggaggacactcaggcgatagactgggacgtggaagaggaggaggaaactgagcagagtagtgagagcctacgatgcaacgttgagcctgtggggaggctgcatattttttcaggagctcacggtcccgaaaaggactttcccctgcatctcggcaagaatgtggtcggcagaatgccagactgctcagtcgctctgccgttcccgtcaatttccaaacagcacgctgaaatcgagatcctggcttgggataaggctccgattctacgggactgcggctcacttaatggcactcagatcctaaggccaccaaaggtgctgtcacccggagttagccataggctacgtgaccaggagctgatcctcttcgccgacttactatgtcagtatcaccgactcgatgtgtctttgccatttgtcagccggggacccttaactgtcgaggaaacaccaagagtccagggagaaacgcagccacaaaggctcctccttgccgaagactcagaggaggaggtcgactttctgagtgagcggagaatggtgaagaagagtcgtaccacaagctcctccgtcattgttcccgagtccgacgaggagggccattccccagttctcggtggactcggcccaccattcgcctttaatctcaattccgacacagatgttgaagagggccagcagccagccaccgaggaggctagtagcgctgctcgcaggggagccaccgtagaggcttag

SEQ ID NO: 345030 - DNA, 921 bp, Artificial Sequence
  derived and/or modified sequence
tgacatgtagggggaaccaaggactccgaagataattacggagactccgaggatctggatctgcaagctacacagtgcttcctggaaaatcaggggcttgaggctgtgcagagtatggaggacgaacccacccaagctttcatgctgactcctccgcaggagctgggtccctctcattgcagtttccaaaccactggtctgctgaattgtaagatgccacccgctgagaaggctagcaggattcgggcagcagaaaaggtttcaagaggagaccaggagtcaccagacgcctgcctacctccaaccgttccagaggcccctgcccctccgcaaaaaccactgaattcacagagtcaaaaacacttggcccctccgcctctgctatcacctctgctccccagtatcaaacctacagtgagaaaaacacggcaagacggttctcaggaggctccagaggccccattgtcctcggagctggaacctttccatcctaaaccaaagattagaacccgcaagtcctctaggatgacccctttcccagccacctctgccgctccagagcctcacccatcgaccagcaccgcacagccggtaactcctaagccaactagccaggctacccgaagccggacgaaccggagcagtgtaaaaactcctgagcccgtcgttccaaccgctcccgagcttcaaccgagcacatctactgaccagcctgtcacgagcgagccaaccagccaagtcactagaggacgcaagtcacggtcatccgtaaaaacccccgagacagtagttcccacagcactggagctgcagcccagtactagcacagatcggccagtgacaagtgagccaacctcacaagccacccgcggtaggaaaaataggtcatcagtaaaaactcccgagcctgtggttccatag

SEQ ID NO: 345031 - DNA, 921 bp, Artificial Sequence
  derived and/or modified sequence
taacatgtgggcggtaccaaggactccgaagataattacggcgattctgaggacctggacctgcaagcaactcagtgctttttggagaaccagggtctcgaggccgtacagtcaatggaggatgaacccactcaggctttcatgttaacacctccccaggaactcggaccctcccactgcagtttccaaacaaccgggctgcttaactgtaaaatgccgcctgcggaaaaagcatcaagaattagagccgctgagaaagtgtcccgaggagatcaggagtctcctgatgcttgccttccacctacagtcccggaggctccagccccaccacagaaaccgcttaactcgcaatcacagaaacacctggccccaccacctctcctctcacctctgctgccatctattaagccaactgtccgaaaaactagacaggatgggtcccaggaggctcccgaggcgccacttagctctgagttggagcctttccacccaaagcccaagatacgaacgcggaagtcctctcgtatgactccatttcccgcaacttcagccgcacccgagccccatccatctactagcactgcacaacctgtcacccctaagcctacctctcaagccacaaggagccggaccaaccgctcgtcagtgaagaccccagagcccgtcgtgcccaccgctcccgagcttcagccctccacctctaccgaccaaccggtgacgtctgagcccaccagccaggtgactaggggcagaaagtcccgcagcagtgtcaaaacccctgagactgtggtgcctacagcattagaactccaaccatctacttccacggataggcccgttacctctgagcctacctcacaagcgacaagaggccgtaagaatcgctcttccgtcaagacaccagagcctgtcgtgccttag

SEQ ID NO: 345032 - DNA, 921 bp, Artificial Sequence
  derived and/or modified sequence
tgacatgtgggtggcaccaaggattccgaagacaactacggggactccgaggatctggatctgcaggctactcagtgtttcctagaaaaccagggactggaggcagtgcagagtatggaagacgaacccacgcaggcttttatgctcaccccacctcaggagttgggcccatcacattgcagtttccaaacaacagggctgcttaattgcaagatgcctccagcggaaaaggcttctcggatcagggccgctgaaaaggttagtaggggggatcaagagtctcccgacgcgtgcttgccccctacagttccagaggccccagcccctcctcagaagcccttaaactcacaaagccagaagcacttagctccaccgcctctgctgagtcctttactgccgagtatcaaacccactgtgcggaaaactcggcaggatgggtcccaggaagccccagaggcccctctcagcagcgaactcgaaccctttcaccccaagcccaagattagaacacggaaaagctcgaggatgactcctttccccgcaacttccgccgcaccggaacctcatccctccaccagcaccgctcagcctgttaccccaaaacccacctctcaggcaacccgttcccggacgaatcggtcgagcgtcaagacccctgagccggttgtgccaaccgctcctgagctccagccatcaacgagcactgaccagccagtgacaagcgagccgacgtctcaggtcaccagaggacggaagagccggagtagtgtgaaaacccctgaaaccgtggtgcctacagcgttagagctccagccctccacctcaacagacaggcctgttaccagtgaacccacaagtcaggccaccaggggaaggaagaatcggtcaagtgttaagacaccagaaccagtagtcccgtag

SEQ ID NO: 345033 - DNA, 735 bp, Artificial Sequence
  derived and/or modified sequence
atggaggacacccaagctattgattgggacgtcgaagaggaggaggagacggaacagtcctccgagtctctccgctgcaatgtagagcccgtgggcagactgcacattttctctggcgctcatggtcccgagaaagacttcccactccacttgggcaaaaatgttgtcggtaggatgccagattgttccgtcgcactacctttcccatcaatttctaaacagcatgccgaaatagagatactggcttgggacaaggcacccatcctgcgggattgtggctccctgaatggcacgcaaatcttgagacccccaaaggttctttctccgggagtatcccatcggctcagggaccaggagctgatcctttttgctgatctgctgtgtcagtatcatcgcctggacgtgagtctgccctttgtgtcccgaggacccttgaccgttgaagaaacaccccgtgtgcagggtgagactcaaccccaaagacttctgctagcagaggactcagaagaagaagtagatttcctgtccgaacgccgaatggtaaagaaaagcagaaccacttcatcgtctgtgatcgttccagaaagcgacgaggagggccactctcctgtcttggggggactggggcctccttttgcctttaacttgaacagcgacaccgacgtggaggagggacagcaaccacatcggggagggctattatcatgtcaaaagcgatgtcactgccgaggctag

SEQ ID NO: 345034 - DNA, 735 bp, Artificial Sequence
  derived and/or modified sequence
atggaagacactcaggccatagattgggacgtggaagaggaagaagagacggaacagtcaagcgagagcctgcggtgcaacgtggaaccagtggggcgtctgcatattttcagcggggctcatggacctgagaaggacttccccttacacctcggtaaaaatgtggtgggacgaatgcctgactgcagcgtcgccctaccatttccctccatttcaaaacagcacgccgaaatcgagatcctggcctgggacaaggcaccaatcctgcgcgattgtgggagcctgaatggcacgcagattcttagaccgccaaaggtcctgagccccggtgtcagtcaccgactccgggaccaggaactgattctttttgccgacctgctgtgccagtatcacaggcttgacgtgtcactacctttcgtgagtcgagggcctttgacagtggaggaaacgccccgagtacaaggagagactcagccgcagcgccttttactggccgaagacagtgaggaggaggtggactttctttccgagcggagaatggtaaaaaaatccagaactacaagctccagcgtcattgtacctgaaagcgacgaagaaggtcactcccctgtcctaggagggctgggacccccttttgcctttaacttgaactctgataccgatgtcgaagaaggtcagcagccacacaggggaggcttactgtcctgccagaaaaggtgtcattgtcgaggctag

SEQ ID NO: 345035 - DNA, 735 bp, Artificial Sequence
  derived and/or modified sequence
atggaagacactcaggcaattgactgggacgtggaggaagaggaggaaactgagcagtcttctgagagccttcgctgcaatgtcgagcctgtcgggcgacttcatatcttcagtggcgctcatgggccagagaaggacttccccctccacttgggtaagaatgtggtcggcagaatgcccgactgcagcgttgcccttccatttccctcgatcagcaagcagcatgctgagattgagattctagcttgggacaaggctccaatcttaagggattgcgggagcctaaacgggacacagatcctccgtcctccgaaggtgttgagcccgggtgtgtcgcacaggctccgcgatcaggaattgatcttgttcgcggatttactttgtcaataccatagacttgatgtatctctaccattcgtctcacgtggtcctctcaccgtggaagagacacccagagtgcagggggaaacccaaccacagagactcctgctagcggaggactccgaagaagaagtcgacttcctctcagagcgccgaatggtgaaaaagagtcgtacgacttcatcgtcagtgatagtacccgaatctgacgaggaaggccatagcccagtgctgggaggcctaggtccgcctttcgcctttaatttgaactccgacacggacgtggaggagggacagcagcctcacagaggaggactcttatcttgccagaagaggtgtcactgtcgcggatag

SEQ ID NO: 345036 - DNA, 735 bp, Artificial Sequence
  derived and/or modified sequence
atggaggacacacaggccatcgactgggatgttgaagaagaagaagagaccgaacagagcagcgagagtctccgctgcaacgtggagcctgtgggtagactacatattttttcgggggctcatggccctgaaaaagacttccctctgcacttgggaaagaatgtcgttggccgaatgcccgactgtagcgtggctctgcccttcccatctatttcaaaacaacatgccgagatcgagattctcgcatgggacaaagcacctatcttaagagactgcggatccttaaacggcactcagatcttgaggccccctaaagtgctgtcaccaggcgtttcccacaggctccgggatcaggaactgattctgtttgcagatctactttgtcaatatcacaggctggatgtgtccttgccattcgtctctcggggtccactgaccgtggaggagactccgagagtacagggggaaactcagccccagcggctgctgctggcagaggacagtgaggaagaggtggactttctctcggaacgccgtatggtgaagaagtctagaaccactagctcaagtgtgatcgttccagaaagcgatgaggaaggccactcccccgttctgggaggactcggaccaccattcgctttcaacctgaatagtgataccgatgtagaggagggacagcaaccacaccgcggaggtctgctctcgtgccagaagagatgccactgtagggggtag

SEQ ID NO: 345037 - DNA, 738 bp, Artificial Sequence
  derived and/or modified sequence
atggaggacacacaagctatcgactgggacgtcgaagaagaagaagagactgaacagtcgagtgagagtctgagatgcaatgtagagccggtaggtcggctccatattttttcaggcgctcatgggccagagaaggactttccgcttcatttagggaaaaacgtggtgggcagaatgcccgactgcagtgtggctctacctttcccttctattagcaagcagcatgccgaaatcgagattctcgcatgggacaaagcaccaatcctcagggactgcggatccttaaacgggacccagattctgcggccacccaaggtgttgagccctggtgtgtcacaccgccttcgcgatcaggagctcattctgttcgctgatctgctttgccagtaccatcggttggacgtgtcattacctttcgtgtctagaggacccctaactgtggaggagactcccagggtgcagggtgaaacacagccccagcggctactcctcgccgaggatagcgaggaggaggttgatttcctgtccgaaaggcgtatggtcaaaaagtctaggactaccagttccagtgtgatcgtgccggagtctgatgaagaggggcatagtcccgttctgggcggtctgggtccaccatttgccttcaatttgaactcggatacagacgtcgaggagggccagcagccagccaccgaggaggcatcctctgccgctaggaggggggctacagtagaggcatag

SEQ ID NO: 345038 - DNA, 738 bp, Artificial Sequence
  derived and/or modified sequence
atggaagacacccaggctattgactgggatgtcgaggaggaagaggagacagagcagtcctctgaatctttacgatgcaatgtggagcccgtcgggaggctgcacattttctcaggtgcacatggcccagaaaaagactttcccctgcacctgggaaaaaatgtggttggtaggatgccagactgctctgttgcattgccgttcccaagcatatccaagcagcacgctgaaattgaaatccttgcctgggataaggcaccaatattgagggactgcgggtcccttaacggaacacagatactgagacccccaaaagtactgtcaccaggtgtcagtcatcggttgcgggaccaggagcttatattgttcgccgacctcttatgtcaataccaccgcctagacgtctcactcccctttgtcagcagaggccctcttaccgtcgaagagaccccccgtgtgcagggtgagactcagccacaaaggcttctgctagcggaagattctgaggaggaggtcgactttctttccgaaagacggatggttaagaagtcaaggaccacatcgtcaagtgtaattgtacccgaaagtgacgaggagggacactcccccgttctgggcggactaggacccccatttgcttttaacctgaatagtgatacagacgtcgaggagggacagcagccagccacagaagaagcatcttccgctgccagacgaggcgcaactgtggaagcctag

SEQ ID NO: 345039 - DNA, 738 bp, Artificial Sequence
  derived and/or modified sequence
atggaagatacccaggccatagattgggacgtggaagaggaggaagaaacagagcaatcatccgagtctctgcgctgcaacgtggaacctgtcggacgcttgcacattttcagtggcgcacacggcccagagaaggacttcccactgcacctgggaaagaacgtggtaggtagaatgcctgattgcagcgttgcgcttccattcccttccatctcaaaacaacatgccgagatcgagattcttgcctgggataaggcccctattcttagagactgcggcagtttgaatggcactcagattctcagaccacctaaggtgctgagcccaggcgtatcgcaccgattgcgagatcaggagctgatcttatttgccgatctcctttgccagtaccaccgactggatgtctcactgccatttgtcagcagaggcccactgactgtggaggaaactccacgggttcagggagagacgcagccacaaaggctgctcctagccgaggactctgaggaggaggtcgacttcttatctgaaaggcgcatggtgaagaaaagccgaacaacgtctagttctgtgatcgtgcctgaaagcgacgaggaggggcactcccccgtgctcggcggactgggtcccccatttgcttttaacttgaattcagatacagatgtggaggagggccagcagcccgcaactgaggaggcgtcctccgccgctcgtagaggcgctaccgttgaggcttag

SEQ ID NO: 345040 - DNA, 666 bp, Artificial Sequence
  derived and/or modified sequence
atggaagacacccaggctatagattgggatgtcgaagaggaagaagagacagagcagagtagcgaaagcctgcggtgcaacgtcgagccagtcggtcggctgcacatcttctccggtgcccacgggcctgagaaggattttccactccatcttggcaaaaatgtggtaggaaggatgcctgattgcagtgtggccctgcctttccccagcatctctaagcaacatgccgagatcgagatcctggcctgggataaagcacccattctgagagattgcgggtccctcaacggcactcagattctgagctcatcgctgccgcctccccagaccagcttactcccactgtctcttaggcttaggttgctgggcgaggaacaaatcgatcctctgagccggctgctcaagcagcttagccctcagccactgtcataccgcctgcctcctccccaaaccagcctgagtccactgtccccgcatcttggcccactgggtgaagaaaaaatcggccctttgtctcggcctttgaagcaactgtgcccacagcccctcagctcgagtctacctccaccccagacaaacctgtcccctctgagcccacacctcggacctctgggcgctgggcaaataggtccgttgtctaggcctttgaaccaattgtcactgtag

SEQ ID NO: 345041 - DNA, 666 bp, Artificial Sequence
  derived and/or modified sequence
atggaggacacgcaggccatcgactgggatgtggaggaggaggaagagactgaacagagcagtgaaagcctgcgctgcaacgtagagccggttgggagactacacattttcagtggggcacacgggccagaaaaagactttcccttacatctgggaaagaacgtcgtggggaggatgcctgactgtagtgtagctctgcccttcccatccatcagcaagcagcacgctgagatcgaaatcctggcatgggacaaagccccaatattgcgagattgcggatctctgaatgggacgcaaatcctgagtagctcactcccaccaccacagacatccctgctgccattgtccctgcgtctgagactgctgggcgaggaacaaattgatcccctcagcagactcctgaaacagctcagtccacagcccctaagctaccgcctcccgccacctcagacaagcctgtcccctctgtcacctcatctcggccctctgggtgaggagaaaatagggcctctgagccggcctcttaaacagctttgcccccaacccttaagtagtagtctcccaccaccacagaccaacctgagtccgctcagcccacacctcggccctttaggggcaggtcagataggtccactgagtcgacctctgaaccaactcagcctctag

SEQ ID NO: 345042 - DNA, 738 bp, Artificial Sequence
  derived and/or modified sequence
atggaagacacacaagcaatcgattgggacgtcgaggaagaagaagagaccgagcagtcctctgagagtctcaggtgcaacgtcgagccggttgggagactgcacattttctctggcgctcacgggccagaaaaagacttccccttgcatcttggtaagaacgtcgttggacggatgcccgactgtagcgtcgccctcccttttccatccatatctaaacagcacgctgaaatcgaaatactggcctgggacaaagcccctatcctccgcgattgtgggagcctgaacggaacccaaatcctaaggcctccaaaagtgctgtcacccggagtgagccatagactacgcgatcaggagctgattctatttgctgacttgctctgtcagtaccaccgccttgacgtgagccttccatttgtgtcgagagggccattgacagtcgaggaaacaccaagagtgcaaggggagacgcagccccagcggctgctgttagcagaggatagcgaggaagaagtcgatttcttatctgagcgaagaatggtgaagaaaagcaggacgaccagctcgagtgttatcgtaccggaatcagacgaggagggacatagtccggtactcgggggtctggggcctccttttgcttttaacttgaactccgataccgatgtcgaggaggggcagcagcccgctacagaagaagcttcctccgccgctcggcgtggggcaaccgttgaagcctag

SEQ ID NO: 345043 - DNA, 735 bp, Artificial Sequence
  derived and/or modified sequence
atggaagacacccaggccatcgattgggatgtggaagaggaggaagaaaccgaacaatcgagcgaatctcttcgatgcaatgttgagcccgttggccgactgcatatttttagcggagctcacggcccagagaaggacttcccacttcacctgggcaagaatgtggtgggtcgcatgcctgattgcagcgttgcgctcccctttccttccatctccaagcagcacgccgagattgagatactggcctgggataaggccccaattctgcgtgattgcggctcactgaacggtacacaaatattgcgtccgccaaaagttttatccccgggtgtgagtcacagactgagggaccaggaactgatcctttttgcggacctgttatgtcagtatcataggcttgatgtatctctgccattcgtgtccaggggaccattaaccgtggaggagactccaagagtgcagggtgagacccaaccccagaggctgttactcgccgaggactccgaagaagaggtagatttcctttctgaaaggcggatggtgaagaaatcaagaaccactagtagttctgtgattgtgcccgagtccgacgaggaaggccactcgccagtgctgggaggcctaggaccaccctttgcatttaacttgaactccgatactgatgtcgaggagggtcagcagccacaccggggagggctattgtcatgtcaaaagaggtgtcactgccgagggtag

SEQ ID NO: 345044 - DNA, 666 bp, Artificial Sequence
  derived and/or modified sequence
atggaagacacccaggcaattgattgggatgtcgaggaggaagaagaaacagagcagtcgtccgaatctttgcgttgtaatgtggagccggtgggaaggctccatatcttcagtggtgcccatgggcctgaaaaagattttcctttgcacctggggaagaatgtggtgggcaggatgcctgactgctctgttgcgttaccctttccctccatatctaagcagcacgccgagatagagattcttgcatgggacaaagcgccaatactgagggactgcggtagcctgaatggtacccaaatcctctccagcagcttgcctccacctcagacctccctgctgccactctctttgagacttaggcttcttggcgaggagcaaatagaccccctgagcagattgcttaaacaactgagtccacagcctctcagctacagactgccaccccctcaaacaagtctgtcaccactgtctccgcacctgggtccgttgggtgaggagaaaatcggcccactgtcacggcctctgaaacagctgtgcccccagccgctcagatcaagtctcccgccacctcagacaaacctgtccccacttagcccccacctggggccactgggagctggtcaaatcggccctttaagccgccctctgaaccaactgtctctgtag

SEQ ID NO: 345045 - DNA, 666 bp, Artificial Sequence
  derived and/or modified sequence
atggaagatactcaagccattgattgggacgttgaggaggaagaggagacggagcagagcagtgagtctctgaggtgcaatgtcgagcctgtggggaggctgcatatcttctccggcgcacacggtccggagaaggacttccctctgcatctgggcaaaaacgtggtaggtcgcatgcccgattgctccgtggccttaccatttcctagcatctctaagcaacacgcagaaattgagatcctcgcatgggacaaagcgcctattctcagagactgtggctcactcaacggcacccaaattctgagctcgtcgttaccgcctcctcagacttctttgttgccactctctctccgcctgcgcctgctgggcgaggagcagattgatccattgtcccggctgcttaagcaactgagtcctcagcctcttagctaccggctccctccaccccaaacgtctctcagtcctttgagcccacacctgggccctttgggcgaggagaaaatcgggccactgtcacgccctttaaagcaactgtgccctcagcctctgagcagcagcctgccaccaccacagacaaatttatcaccactgagcccccacttaggaccactgggggcaggacagattggtcccctatcacgccctttgaaccaattaagcctgtag

SEQ ID NO: 345046 - DNA, 738 bp, Artificial Sequence
  derived and/or modified sequence
atggaagacacccaggcaatagattgggacgtcgaggaagaggaagaaactgagcaatcttcagagagtctccgttgtaatgtggagcctgtgggtagactgcatatcttcagcggtgcacacggcccagagaaagatttccctctgcaccttggtaaaaacgtggtcgggaggatgccagactgcagcgtggctctgccatttccatcaatcagtaaacagcatgccgagatcgaaattctcgcctgggataaggccccaattcttagagattgtggttcactcaatggcacgcagatactcagacctcccaaggttctgagccctggggtgtcccatagactacgcgaccaggagctgatactgtttgccgacctcctgtgccagtatcatcgcctggatgtgtctttaccgtttgtatcccgcggaccattgactgttgaggagacacccagagtccagggtgagacgcagccccagcgactgctgctggccgaggattccgaggaagaggtggactttctcagcgagcggcgaatggttaagaagagccgtactacatcttcttccgtgattgtccctgagtcagatgaggagggacactctcccgtcctgggaggactgggcccaccctttgcctttaatcttaatagcgatactgacgtggaagagggccagcagcccgcaacagaggaggccagcagcgccgctcgacgcggtgccacagtggaagcttag

SEQ ID NO: 345047 - DNA, 735 bp, Artificial Sequence
  derived and/or modified sequence
atggaagatacacaagctatcgattgggacgttgaggaggaggaggagaccgagcagtctagcgaatctcttcgctgtaacgttgagccagtggggagacttcacattttttccggcgctcacggtcccgaaaaagattttcctctacatctgggcaaaaatgttgtgggcaggatgccggactgctccgtagcccttccctttccgagcatcagtaaacaacacgccgagatcgaaatcctcgcttgggacaaggctcccatcctccgggattgtgggtccctgaacggcacacagattttgcggcctccgaaagtcctaagtccgggagtcagccatagattgagagaccaagaactaatcctttttgctgacctgctctgtcaatatcataggctcgacgtatctctccctttcgtgagccgagggccactgacagttgaagaaacaccaagagtgcaaggtgagacgcagccacagaggctcctactagcagaagatagcgaggaagaagttgattttctgtcagagcgtaggatggttaagaagagccgcaccacttccagctcagtaatcgttcctgaatcagatgaggaggggcacagccctgtcctgggcggactcggcccacccttcgccttcaatctcaacagtgacactgatgttgaggaaggacagcaacctcaccgcggtggcctcctgtcctgccagaaacgttgccactgccggggttag

SEQ ID NO: 345048 - DNA, 735 bp, Artificial Sequence
  derived and/or modified sequence
atggaggacacccaggctatcgactgggatgtcgaagaagaagaggaaacagaacaaagctccgagagcttgcggtgtaatgttgaacctgtcggtaggctgcacatcttctccggtgcacatggaccagagaaggactttccgttgcatctgggaaagaacgtagttgggcgtatgcctgactgcagtgtggctctgcccttcccaagcatctcaaaacagcacgcagaaatcgagattctggcatgggataaagcacccatcctgcgggattgcggctctctgaacggcacacagatcctgcgcccaccaaaagtcctcagccccggtgtttctcacaggctgcgggaccaggaattgatcctattcgcagatcttttatgccagtatcaccgtctggatgtttccctcccattcgtgtcaagaggtccattgaccgttgaggagacaccacgagtccagggagaaactcaacctcagagactgctcttggcggaggatagtgaagaggaagtggacttcctgagcgagcggcgtatggtcaaaaagagccggaccacatctagttctgtcatcgtgcccgagagcgatgaggagggacactcccctgtgctcgggggactcggcccacccttcgctttcaacttgaatagtgacacagacgtcgaagagggacaacaacctcaccgcggagggctcctttcctgccaaaagcgctgccactgtaggggatag

SEQ ID NO: 345049 - DNA, 666 bp, Artificial Sequence
  derived and/or modified sequence
atggaggatacgcaagccatcgattgggacgtggaagaggaagaggaaacggaacagagcagtgagtctctccgctgtaacgtcgagcccgtcggcaggctgcatattttcagcggtgctcacgggcctgaaaaagatttccctctgcatttaggtaagaacgtggtgggaagaatgcctgactgcagtgtggccttgccattcccgtctatctccaaacagcatgctgaaatcgaaattctggcctgggacaaagcgcctatactcagggattgcggtagtttgaacggaacacagatcctttcatcgtctctgcccccacctcaaaccagcttgctccctttaagcttgaggctccgccttcttggtgaggaacaaattgaccctctcagccgacttctcaagcagctgtcgcctcagcccctcagctaccgattaccacccccacagaccagcttatcaccactgtctccccatctgggccctttgggcgaagaaaagatcggccctctgtctcgcccactcaagcagctctgcccccagccactttccagttccctgccccctcctcagacaaacttatcacctctgtcacctcacttgggccctctgggtgccggacagataggacctctttcgagacctctcaaccaactcagcctgtag

SEQ ID NO: 345050 - DNA, 666 bp, Artificial Sequence
  derived and/or modified sequence
atggaggatactcaggctattgattgggatgtggaagaggaggaggaaacagagcagagctctgaatccctgcgatgcaatgtcgagcccgtgggacggctccatatcttttcaggagcacacggccctgaaaaggactttcccttgcatctgggaaaaaacgtggtgggacggatgcccgattgctccgtggccttaccatttccgtctatctccaagcagcatgccgagattgaaatccttgcctgggataaggctcccatcttgagagactgcgggtcactgaatggaacccaaattctgtccagcagcttaccacctccacagaccagtctgcttcctctgtccctgcgcttaagattgctgggggaggaacagatcgacccgctcagcaggctcctgaagcagctgagcccccagcccttgtcctatcggctgcccccaccacaaacctcgttgagccccctgtcgccgcatctcggcccactgggagaagaaaagataggtcctctctctagacctcttaagcagttgtgtcctcagcccctctcttctagcctccctcctccacagacaaacctgtctccactgagtcctcacctcggcccactgggcgcaggtcagattggaccgctctccagacctctcaaccaactgagtttgtag

SEQ ID NO: 345051 - DNA, 738 bp, Artificial Sequence
  derived and/or modified sequence
atggaggacactcaagccatagattgggacgtggaagaggaggaggagacagagcaaagtagtgagtcacttagatgcaacgtggagcctgtgggcaggctccacatcttcagcggggctcatggccctgagaaggacttccctctccacctcgggaaaaatgtggtaggcaggatgcccgattgctcagtggctcttccatttccttcaatctcaaagcagcacgcagaaatcgaaattctggcttgggacaaggctcctatattgcgggactgcggcagccttaatggaacccaaatcctgcgccctccaaaggtactcagccccggtgtgtcccaccgcttgagagatcaggagctcattctgtttgccgacctgctttgccagtaccataggctggacgtgtcactgccatttgtgagcaggggccctctcaccgtagaggaaacccctagggtgcagggagagactcagccccagcggctgttgctagccgaggacagcgaagaagaggtggactttttgagtgagaggcgtatggtaaagaaatcaagaacaacttcaagtagcgtaatcgttccggagtctgatgaagagggacacagtccagttcttgggggattaggtccccctttcgcttttaaccttaacagtgacaccgacgtcgaggaggggcagcagcctgcaacagaggaagcctctagtgctgccaggcggggagctactgtggaggcatag

SEQ ID NO: 345052 - DNA, 666 bp, Artificial Sequence
  derived and/or modified sequence
atggaggacacccaggccatcgactgggacgtggaggaggaggaggagaccgagcagagcagcgagagcctgagatgcaacgtggagcccgtgggcagactgcacatcttcagcggcgcccacggccccgagaaggacttccccctgcacctgggcaagaacgtggtgggcagaatgcccgactgcagcgtggccctgcccttccccagcatcagcaagcagcacgccgagatcgagatcctggcctgggacaaggcccccatcctgagagactgcggcagcctgaacggcacccagatcctgagcagcagcctgccccccccccagaccagcctgctgcccctgagcctgagactgagactgctgggcgaggagcagatcgaccccctgagcagactgctgaagcagctgagcccccagcccctgagctacagactgccccccccccagaccagcctgagccccctgagcccccacctgggccccctgggcgaggagaagatcggccccctgagcagacccctgaagcagctgtgcccccagcccctgagaagcagcctgccccccccccagaccaacctgagccccctgagcccccacctgggccccctgggcgccggccagatcggccccctgagcagacccctgaaccagctgagcctgtag

SEQ ID NO: 345053 - protein, 224 aa, Artificial Sequence
  derived and/or modified sequence
MRVTAPRTVLLLLSGALALTETWAGSHSMRYFYTAMSRPGRGEPRFIAVGYVDDTQFVRFDSDAASPRMAPRAPWIEQEGPEYWDRETQISKTNTQTYRESLRNLRGYYNQSEAGSHTLQRMYGCDVGPDGRLLRGHDQSAYDGKDYIALNEDLSSWTAADTAAQITQRKWEAAREAEQWRAYLEGLCVEWLRRYLENGKETLQRADQEQKSLFPAQRLELSNE

SEQ ID NO: 345054 - DNA, 741 bp, Artificial Sequence
  derived and/or modified sequence
atggccagcgtgggcagaagcgagggcaccgccggcggcggcgccggccccggcgagcccagaagagaggagggcagagccggcctgagccccagcagcccccccggcagccacagcatgagatacttctacaccgccatgagcagacccggcagaggcgagcccagattcatcgccgtgggctacgtggacgacacccagttcgtgagattcgacagcgacgccgccagccccagaatggcccccagagccccctggatcgagcaggagggccccgagtactgggacagagagacccagatcagcaagaccaacacccagacctacagagagagcctgagaaacctgagaggctactacaaccagagcgaggccggcagccacaccctgcagagaatgtacggctgcgacgtgggccccgacggcagactgctgagaggccacgaccagagcgcctacgacggcaaggactacatcgccctgaacgaggacctgagcagctggaccgccgccgacaccgccgcccagatcacccagagaaagtgggaggccgccagagaggccgagcagtggagagcctacctggagggcctgtgcgtggagtggctgagaagatacctggagaacggcaaggagaccctgcagagagccgacccccccaagacccacgtgacccaccaccccatcagcgaccacgaggccaccctgagatgctgggccctgggcttctaccccgcctag

SEQ ID NO: 345055 - DNA, 1089 bp, Artificial Sequence
  derived and/or modified sequence
atgagagtgaccgcccccagaaccgtgctgctgctgctgagcggcgccctggccctgaccgagacctgggccggcagccacagcatgagatacttctacaccgccatgagcagacccggcagaggcgagcccagattcatcgccgtgggctacgtggacgacacccagttcgtgagattcgacagcgacgccgccagccccagaatggcccccagagccccctggatcgagcaggagggccccgagtactgggacagagagacccagatcagcaagaccaacacccagacctacagagagagcctgagaaacctgagaggctactacaaccagagcgaggccggcagccacaccctgcagagaatgtacggctgcgacgtgggccccgacggcagactgctgagaggccacgaccagagcgcctacgacggcaaggactacatcgccctgaacgaggacctgagcagctggaccgccgccgacaccgccgcccagatcacccagagaaagtgggaggccgccagagaggccgagcagtggagagcctacctggagggcctgtgcgtggagtggctgagaagatacctggagaacggcaaggagaccctgcagagagccgacccccccaagacccacgtgacccaccaccccatcagcgaccacgaggccaccctgagatgctgggccctgggcttctaccccgccgagatcaccctgacctggcagagagacggcgaggaccagacccaggacaccgagctggtggagaccagacccgccggcgacagaaccttccagaagtgggccgccgtggtggtgcccagcggcgaggagcagagatacacctgccacgtgcagcacgagggcctgcccaagcccctgaccctgagatgggagcccagcagccagagcaccatccccatcgtgggcatcgtggccggcctggccgtgctggccgtggtggtgatcggcgccgtggtggccaccgtgatgtgcagaagaaagagcagcggcggcaagggcggcagctacagccaggccgccagcagcgacagcgcccagggcagcgacgtgagcctgaccgcctag

SEQ ID NO: 345056 - DNA, 675 bp, Artificial Sequence
  derived and/or modified sequence
atgagagtgaccgcccccagaaccgtgctgctgctgctgagcggcgccctggccctgaccgagacctgggccggcagccacagcatgagatacttctacaccgccatgagcagacccggcagaggcgagcccagattcatcgccgtgggctacgtggacgacacccagttcgtgagattcgacagcgacgccgccagccccagaatggcccccagagccccctggatcgagcaggagggccccgagtactgggacagagagacccagatcagcaagaccaacacccagacctacagagagagcctgagaaacctgagaggctactacaaccagagcgaggccggcagccacaccctgcagagaatgtacggctgcgacgtgggccccgacggcagactgctgagaggccacgaccagagcgcctacgacggcaaggactacatcgccctgaacgaggacctgagcagctggaccgccgccgacaccgccgcccagatcacccagagaaagtgggaggccgccagagaggccgagcagtggagagcctacctggagggcctgtgcgtggagtggctgagaagatacctggagaacggcaaggagaccctgcagagagccgaccaggagcagaagagcctgttccccgcccagagactggagctgagcaacgagtag

SEQ ID NO: 345057 - DNA, 741 bp, Artificial Sequence
  derived and/or modified sequence
atggcatctgtcggcagatccgaaggtactgcaggagggggtgcaggtccaggagagcctaggcgggaggaggggcgcgctggtctttcgccctccagtccaccaggttcccatagcatgaggtatttttacaccgcaatgagtcgccctgggaggggcgagccacgatttattgccgtggggtatgtcgatgacactcagtttgtaaggttcgatagcgatgctgcctcaccccggatggccccaagagccccttggattgagcaggagggtcccgaatattgggacagagaaacacagatcagtaaaacgaacacacagacgtatcgggaatcgctccgcaatcttcggggctactacaatcagtcggaagccggttcccataccctccagaggatgtatggatgcgacgtcggccctgacgggaggttactgcgcgggcacgatcagagcgcttacgacggtaaagactatatagcactgaatgaggatctgtcctcatggactgctgctgatactgcggcccagattactcagcggaagtgggaagcagcccgagaggccgagcaatggagggcttacctcgagggtctctgcgttgagtggttacgtcgatatctcgagaatggcaaggagacactgcagcgcgcagatcctcctaaaacgcatgtaactcaccatccaatctctgaccacgaagctacactgcggtgctgggcactgggcttctacccagcctag

SEQ ID NO: 345058 - DNA, 1089 bp, Artificial Sequence
  derived and/or modified sequence
atgagagtcacagcccctaggaccgttctattgttactgtcaggcgccctggctctaacagagacctgggcaggttcccactcgatgcggtacttttatactgccatgagccgaccaggacgtggagaaccgcggtttattgcggtcggatacgtggatgacacacagtttgtgcgattcgacagtgacgcagcttcaccccgcatggccccgcgagctccgtggatagagcaggagggaccggaatactgggatagagaaactcagatttcgaagaccaacactcagacataccgggagagtctcaggaacttaaggggttactataaccagagcgaggcgggctcacataccctgcagaggatgtatggatgcgatgttggccccgatggccgtctgctgcggggtcatgatcagagtgcctacgatggcaaggattacatcgccctgaacgaagacctgtcttcgtggaccgcagccgacaccgccgcccaaattacccagcggaagtgggaggctgcccgtgaggccgaacagtggcgtgcttacctggagggcctgtgtgtagaatggctgcgccgataccttgaaaatggaaaggaaactctccaaagggccgaccctccaaaaacccatgtgacacatcaccccattagcgatcatgaggccactctgaggtgttgggccctgggtttctacccagctgaaattactctgacatggcagagggacggagaggatcagacacaggataccgagctggtagaaacccggcctgcaggggacagaacatttcagaagtgggccgctgtcgtggttcctagcggggaagagcaacgctacacctgccacgtgcagcacgaagggctccctaagcctctcactctgcggtgggagccaagctcccagtctacaattcccatcgtagggatcgtggcaggactggcggttctggccgtggtcgtgatcggcgcggtggttgctaccgttatgtgcagacgtaaatctagcgggggtaaagggggcagttatagtcaggcggcttcttccgactctgcgcaaggctcggatgtctcgctgacagcatag

SEQ ID NO: 345059 - DNA, 675 bp, Artificial Sequence
  derived and/or modified sequence
atgcgcgtcacagctccccgaacagtgcttctgcttctgtctggagctcttgcgttgacagagacctgggctgggtcccacagcatgagatatttttatactgccatgtccagaccggggcgcggagagccacgtttcattgccgtgggatatgtggacgacacccaattcgtcaggttcgactctgacgcggcctcaccaaggatggcaccccgagccccatggatcgagcaggagggtccagaatattgggatcgggagacccaaatcagtaaaaccaacacacagacctatagggagtcactccggaatctgcgaggctactacaatcagtccgaggctggtagccataccctgcagcgcatgtacgggtgtgatgtcgggccagacggacgtctgctgcgcggtcacgaccagtctgcatacgatggtaaggattatatcgctctgaatgaagacttaagctcctggacggccgcggatacagccgcccagattacacagaggaaatgggaggccgcccgcgaggccgaacagtggagggcttacctggagggtttatgtgttgaatggctgcgccgttatctggagaatggcaaagaaaccctccaaagagctgatcaagagcagaagagcttatttcccgcgcaacggctggagttaagcaatgagtag

SEQ ID NO: 345060 - DNA, 1605 bp, Artificial Sequence
  derived and/or modified sequence
tctagagaagccaatcagtgtcgccggggtcccagttctaaagtccccacgcacccacccggactcaaaatctcctcagacgccgagatgcgggtcacggcgccccgaaccgtcctcctgctgctctcgggagccctggccctgaccgagacctgggccggctcccactccatgaggtatttctacaccgccatgtcccggcccggccgcggggagccccgcttcatcgcagtgggctacgtggacgacacccagttcgtgaggttcgacagcgacgccgcgagtccgaggatggcgccccgggcgccatggatagagcaggaggggccggagtattgggaccgggagacacagatctccaagaccaacacacagacttaccgagagagcctgcggaacctgcgcggctactacaaccagagcgaggccgggtctcacaccctccagaggatgtacggctgcgacgtggggccggacgggcgcctcctccgcgggcatgaccagtccgcctacgacggcaaggattacatcgccctgaacgaggacctgagctcctggaccgcggcggacacggcggctcagatcacccagcgcaagtgggaggcggcccgtgaggcggagcagtggagagcctacctggagggcctgtgcgtggagtggctccgcagatacctggagaacgggaaggagacgctgcagcgcgcggaccccccaaagacacatgtgacccaccaccccatctctgaccatgaggccaccctgaggtgctgggccctgggcttctaccctgcggagatcacactgacctggcagcgggatggcgaggaccaaactcaggacaccgagcttgtggagaccagaccagcaggagatagaaccttccagaagtgggcagctgtggtggtgccttctggagaagagcagagatacacatgccatgtacagcatgaggggctgccgaagcccctcaccctgagatgggagccatcttcccagtccaccatccccatcgtgggcattgttgctggcctggctgtcctagcagttgtggtcatcggagctgtggtcgctactgtgatgtgtaggaggaagagctcaggtggaaaaggagggagctactctcaggctgcgtccagcgacagtgcccagggctctgatgtgtctctcacagcttgaaaagcctgagacagctgtcttgtgagggaccgagatgcaggatttcttcacgcctcccctttgtgacttcaagagcctctggcatctctttctgcaaaggcacctgaatgtgtctgcgtccctgttagcataatgtgaggaggtggagagacagcccacccttgtgtccactgtgacccctgttcccatgctgatctgtgtttcctccccagtcatctttcttgttccagagaggtggggctggatgtctccatctctgtctcaactttatgtgcactgagctgcaacttcttacttccctactgaaaataagaatctgaatataaatttgttttctcaaatatttgctatgagaggttgatggattaattaaataagtcaattcctggaatttgaaagagcaaataaagacctgagaaccttccagaa

SEQ ID NO: 345061 - DNA, 741 bp, Artificial Sequence
  derived and/or modified sequence
atggcctctgtgggccgctctgagggcacagctgggggcggggccggccctggagagccccggcgggaggagggccgggccggcctgagccccagcagccccccaggcagccacagcatgagatacttctacacagccatgagccggcccggccgcggggagccccgcttcatcgctgtgggctacgtggatgacacccagtttgtgcgctttgacagtgatgctgccagccccaggatggccccccgggccccctggattgagcaggagggccctgagtactgggaccgggagacccagatcagcaagaccaacacccagacctaccgggagagcctgaggaacctgcggggctactacaaccagagcgaggccggcagccacaccctgcagaggatgtatggctgtgatgtgggcccagatggccgcctgctgcggggccatgaccagagcgcctatgatggcaaggactacatcgccctgaatgaagacctgagctcctggacagctgctgacacagctgcccagatcacccagaggaagtgggaggccgcccgggaggccgagcagtggagggcctacctggagggcctgtgtgtggagtggctgcggcgctacctggagaatggcaaggagaccctgcagagagctgacccccccaagacccacgtgacccaccaccccatcagtgaccacgaggccaccctgcgctgctgggccctgggcttctacccagcctag

SEQ ID NO: 345062 - DNA, 1089 bp, Artificial Sequence
  derived and/or modified sequence
atgagggtgacagcccccaggacagtgctgctgctgctgagcggggccctggccctgacagagacctgggccggcagccacagcatgagatacttctacacagccatgagcaggcctggccgcggggagccccgcttcatcgctgtgggctacgtggatgacacccagtttgtgcgctttgacagtgatgctgccagccccaggatggccccccgggccccctggattgagcaggagggccctgagtactgggaccgggagacccagatcagcaagaccaacacccagacctaccgggagagcctgaggaacctgcggggctactacaaccagagcgaggccggcagccacaccctgcagaggatgtatggctgtgatgtgggcccagatggccgcctgctgcggggccatgaccagagcgcctatgatggcaaggactacatcgccctgaatgaagacctgagctcctggacagctgctgacacagctgcccagatcacccagaggaagtgggaggccgcccgggaggccgagcagtggagggcctacctggagggcctgtgtgtggagtggctgcggcgctacctggagaatggcaaggagaccctgcagagagctgacccccccaagacccacgtgacccaccaccccatcagtgaccacgaggccaccctgcgctgctgggccctgggcttctacccagctgagatcaccctgacctggcagagagatggagaggaccagacccaggacacagagctggtggagaccaggcctgctggggacaggaccttccagaagtgggccgctgtggtggtgcccagcggggaggagcagcgctacacctgccacgtgcagcacgagggcctgcccaagcccctgaccctgcgctgggagcccagcagccagagcaccatccccatcgtgggcatcgtggccggcctggccgtgctggccgtggtggtgattggagctgtggtggccaccgtgatgtgcaggaggaagagcagcggcggcaagggcggcagctacagccaggccgccagcagtgacagcgcccagggcagtgatgtgtccctgacagcctag

SEQ ID NO: 345063 - DNA, 675 bp, Artificial Sequence
  derived and/or modified sequence
atgagggtgacagcccccaggacagtgctgctgctgctgagcggggccctggccctgacagagacctgggccggcagccacagcatgagatacttctacacagccatgagcaggcctggccgcggggagccccgcttcatcgctgtgggctacgtggatgacacccagtttgtgcgctttgacagtgatgctgccagccccaggatggccccccgggccccctggattgagcaggagggccctgagtactgggaccgggagacccagatcagcaagaccaacacccagacctaccgggagagcctgaggaacctgcggggctactacaaccagagcgaggccggcagccacaccctgcagaggatgtatggctgtgatgtgggcccagatggccgcctgctgcggggccatgaccagagcgcctatgatggcaaggactacatcgccctgaatgaagacctgagctcctggacagctgctgacacagctgcccagatcacccagaggaagtgggaggccgcccgggaggccgagcagtggagggcctacctggagggcctgtgtgtggagtggctgcggcgctacctggagaatggcaaggagaccctgcagagagctgaccaggagcagaagagcctcttccctgcccagaggctggagctgagcaatgaatag

SEQ ID NO: 345064 - DNA, 741 bp, Artificial Sequence
  derived and/or modified sequence
atggccagcgtgggccggagcgagggcaccgccggcggcggcgccggacccggcgaaccacgacgcgaggagggcagggccggcctgtccccttcatctccacctggctcccacagcatgagatacttctatactgcgatgtcgagacccggcagaggcgagcctagattcatagctgttgggtacgtggatgatacacagttcgtgaggttcgatagtgacgcagcctccccccgcatggccccacgtgccccttggatcgaacaggaagggccagaatactgggatcgcgagacacagatttctaaaaccaatacccagacctaccgcgaaagtttgaggaacctgcgcggctactacaaccagagcgaggccgggtcacacacactacagcggatgtatggctgcgatgtgggcccagacggacgcttattaaggggacacgatcaatcagcctatgacggtaaggactatattgcgcttaatgaggacttgagtagctggacagccgcagatacggccgcccaaatcactcagaggaagtgggaagcggcacgcgaagctgaacagtggagagcatacctcgaagggttatgtgtggagtggctgagacgctacctggagaacggcaaagagacactccaacgagcggatccacccaagactcatgttactcatcatcccatctccgatcatgaggctacactgagatgctgggcactagggttttatccagcatag

SEQ ID NO: 345065 - DNA, 1089 bp, Artificial Sequence
  derived and/or modified sequence
atgcgggtgaccgccccccggaccgtgctgctgctgctgagcggcgccctagctcttactgagacatgggccgggagccactctatgcggtatttttacaccgccatgtcccgccctggacgcggcgagccaaggttcattgcagtgggctacgtagacgacacccagtttgtgaggttcgactctgacgcggctagtcctcgtatggctccacgggctccttggattgagcaagagggacctgagtactgggaccgcgaaactcagatttcaaagacaaatacccaaacgtaccgcgaatctctgcgtaaccttaggggctactacaaccagagtgaggccggaagccataccctgcagcgtatgtacggctgcgacgtgggacccgacggtagactgctccggggtcatgatcagagtgcctatgatgggaaggattacatcgcattgaacgaggatctctcatcatggacagccgcagacacagccgcgcaaatcactcaacgtaagtgggaggctgcgcgcgaggccgaacagtggcgggcatatctcgaaggcctgtgcgttgagtggctgaggcgctaccttgaaaatggcaaagagaccttacagagagcagatccgccgaagacccatgttacacaccaccccatttctgaccatgaagctacattgcgctgctgggccctggggttctaccctgccgagattacactcacatggcagcgggatggtgaggatcaaacccaggatacggagctggtggagacaagacctgcaggagatcggacgtttcagaagtgggcagccgtggtggtgccttccggagaagagcagcgatacacttgtcatgtgcagcatgaaggattgccgaagccgctgaccctcaggtgggaaccctcttctcaaagtaccatccccatagtgggaatagttgctggactagccgtactcgctgtcgtggtgattggggcagtcgttgcaaccgtcatgtgccgccggaaatcctccggcggcaagggagggtcttattcccaggctgctagtagcgattctgcacagggttccgacgtaagcctcacggcctag

SEQ ID NO: 345066 - DNA, 675 bp, Artificial Sequence
  derived and/or modified sequence
atgcgggtgaccgccccccggaccgtgctgctgctgctgagcggcgcgttagctctgacagaaacttgggccgggtcccacagcatgagatacttttacaccgccatgagtcgtcccggacggggcgaaccacgctttatcgccgttgggtacgtagatgacactcagtttgtgcgtttcgactcggatgcagcttcgcctaggatggcccctcgtgcaccctggatcgagcaggagggacctgagtattgggaccgcgaaacacagataagcaaaactaatacccagacgtaccgggagtccctgagaaacttgcggggctactacaatcagtctgaagctggaagccatactttgcaaaggatgtacgggtgcgacgtcgggccagacggtcgactgcttcggggccacgatcagtcggcctatgacgggaaggattacatcgccctcaacgaggaccttagcagctggaccgctgccgacacagcagcgcaaatcacacaaagaaagtgggaagccgcgcgcgaagccgagcagtggagagcctatttagagggactgtgcgttgaatggcttaggaggtatctagaaaacgggaaagaaacattgcagcgagctgatcaggaacagaagtcactgttcccagctcagcgcctcgagttatcaaacgagtag

SEQ ID NO: 345067 - DNA, 741 bp, Artificial Sequence
  derived and/or modified sequence
atggcttctgttggaaggtccgagggaacagcaggcggaggggcaggtccaggcgagcctagacgcgaggagggaagagcaggactcagtccttcatctccacccggatcccactcaatgcgctacttttatactgctatgtctcgccctggccgtggagagcctagatttatcgccgtggggtacgttgatgacacacagttcgtccgcttcgacagtgacgctgctagccctcgaatggctccccgagccccttggattgaacaggagggcccagagtattgggaccgggagacacagatctctaaaacaaacactcagacatacagagaatccttaaggaatctgcggggatattacaatcagagcgaggctgggtcccacactctacagcggatgtacggatgcgacgtggggccagacggacgccttttacgagggcacgaccagagcgcttacgacgggaaagactatattgccctgaacgaagacctgtcctcctggacagctgccgatacagctgcacagatcacccagaggaagtgggaggccgcacgagaggccgaacagtggagggcctacctggaaggtctctgcgttgaatggttgcgtcggtacctggaaaacggcaaggagacgctccagcgggctgacccgcctaagacacatgtgacccatcacccaatctccgatcacgaggccacactcagatgctgggcacttggtttttacccagcctag

SEQ ID NO: 345068 - DNA, 1089 bp, Artificial Sequence
  derived and/or modified sequence
atgcgtgtcacagctccgagaaccgtcctattactcctttctggagcccttgccctgactgagacttgggccggatcacattctatgagatacttttatacggccatgagcaggccgggtagaggggagcctagatttattgctgtcgggtatgtggacgacacgcagttcgtccgcttcgactcagacgcagcttcacctaggatggcaccacgggcaccttggattgaacaggaggggcctgagtactgggatagggagacccaaataagcaagactaatactcagacttatcgcgaatcactgcgcaatctgcggggatattacaatcagagcgaggcagggagccatacactgcagagaatgtacggatgtgacgtcggcccagacggcagactattgagagggcacgatcagtctgcttatgatggaaaagactatattgcgctgaatgaagacctctccagttggactgctgctgatacagctgcccagatcactcagcggaaatgggaggctgctcgggaagctgagcagtggagggcctatcttgaggggctgtgtgtcgagtggcttcggaggtacctcgagaacggcaaagagaccttgcagcgggctgaccccccaaaaacccatgtgacgcaccaccctatatccgatcacgaagccacgttacggtgctgggctctagggttctatcctgcggaaatcacccttacgtggcaacgagatggagaggatcagacacaggatactgagctggtcgagacacggccagctggcgatcgcacctttcagaagtgggcagcagtggtggtaccctccggcgaagagcagaggtatacttgccatgtacagcatgagggcctgcccaaaccactgacactacgctgggagccaagctcacaatcaaccataccaatagttgggattgttgccggtttggccgtgctggcggtggtggttataggagccgtggttgccaccgttatgtgtcgcaggaaatctagcggcggaaaagggggttcatattcccaggccgcatcaagtgactccgcccagggctcagatgtcagcctaaccgcctag

SEQ ID NO: 345069 - DNA, 675 bp, Artificial Sequence
  derived and/or modified sequence
atgcgcgtcacggccccaaggactgtgctactgcttctctcaggggctttagctcttaccgaaacatgggccggaagtcattccatgaggtatttttacacggcgatgtccagaccagggcgaggagagcctcgcttcattgctgttggctacgttgatgatacgcagttcgtgagatttgatagcgacgccgcttccccgagaatggcacccagggccccatggatcgagcaggaagggccagagtattgggaccgggaaactcagatttcaaagaccaacacgcagacataccgggaaagtttaagaaacctgcggggatattataatcaatctgaggctgggagccacaccctgcagaggatgtacggatgcgacgtcggtccagacgggcgactccttcgaggacacgaccaaagtgcatacgacgggaaggactacatcgctctgaacgaagacttaagctcatggacagctgccgatactgcagcccagatcactcagcgcaaatgggaggcagcacgggaagcggaacaatggagggcatacttggaaggtctttgcgtggagtggctccggagatacctcgagaatgggaaggaaactctgcagcgggctgaccaagaacaaaagtcccttttccccgctcagagactggagttgtcgaatgaatag

SEQ ID NO: 345070 - protein, 351 aa, Artificial Sequence
  derived and/or modified sequence
MVLSQDGSVQSGFLAEGHLDGQPFLRYDRQKRRAKPQGQWAEDVLGAETWDTETEDLTENGQDLRRTLTHIKDQKGGLHSLQEIRVCEIHEDSSTRGSRHFYYNGELFLSQNLETQESTVPQSSRAQTLAMNVTNFWKEDAMKTKTHYRAMQADCLQKLQRYLKSGVAIRRTVPPMVNVTCSEVSEGNITVTCRASSFYPRNITLTWRQDGVSLSHNTQQWGDVLPDGNGTYQTWVATRIRQGEEQRFTCYMEHSGNHGTHPVPSGKALVLQSQRTDFPYVSAAMPCFVIIIILCVPCCKKKTSAAEGPELVSLQVLDQHPVGTGDHRDAAQLGFQPLMSATGSTGSTEGA

SEQ ID NO: 345071 - DNA, 1056 bp, Artificial Sequence
  derived and/or modified sequence
atggtgctcagccaggacggtagcgtgcagtcagggttcctggccgaaggacacctagatggacagcccttcctcagatatgaccgacagaagcgacgcgcaaagccacaaggccagtgggcggaggacgtgctgggagcggagacatgggataccgaaacagaagatctaaccgagaatgggcaggatctgcggcgtaccttaacacacataaaggaccagaagggaggcctgcattcgctgcaggaaatccgtgtctgtgagatacatgaagacagctctactcgaggaagtcgacatttctactacaacggggagctgtttctctctcagaatcttgagacacaagaatccaccgtgcctcagagtagtcgggcccagactctggcaatgaatgtgactaatttttggaaggaggacgcaatgaaaaccaagacgcactacagggctatgcaggccgactgcctccagaagctccagcggtatctcaaatccggagtggcaatacgacggaccgtgccacctatggtcaacgttacatgcagcgaagtctccgagggcaatatcactgtgacgtgccgggcctcttcattctaccctcggaacattaccctgacttggcggcaggacggcgtgagcctaagtcataatacacagcagtggggggacgtgctcccagatgggaacggcacttatcagacttgggtggcgacgagaattcgccaaggagaagagcagcgcttcacctgctacatggaacatagtggaaatcacggcacacatccagtgccgtctgggaaggcactggtgctgcagtcacaacggaccgattttccttatgtgtccgcggcaatgccatgcttcgtgattatcattatcctgtgcgttccatgttgcaagaaaaagacgtctgctgcagagggacctgaactggtctcgttgcaagtgttggatcaacatcctgtggggacgggggatcacagagatgcagcacaactggggttccagccactcatgtcagccaccggcagcacaggcagcactgagggcgcttag

SEQ ID NO: 345072 - DNA, 1056 bp, Artificial Sequence
  derived and/or modified sequence
atggtgctgagccaggacggctctgtgcagagcggcttcctggccgagggccacctggatggccagcccttcctgcgctatgaccggcagaagaggcgggccaagccccagggccagtgggccgaggatgtgctgggcgctgagacctgggacacagaaacagaggacctgacagaaaatggccaggacctgcggaggaccctgacccacatcaaggaccagaagggcggcctgcacagcctgcaggagatccgggtgtgtgagatccacgaggacagcagcacccggggcagccgccacttctactacaacggggagctgttcctgagccagaacctggagacccaggagagcacagtgccccagagcagccgggcccagaccctggccatgaatgtgaccaacttctggaaggaggatgccatgaagaccaagacccactaccgggccatgcaggccgactgcctgcagaagctgcagcgctacctgaagtctggagtggccatccggaggacagtgccccccatggtgaatgtgacctgcagcgaggtgtctgagggcaacatcaccgtgacctgccgggccagcagcttctaccccaggaacatcaccctgacctggaggcaggatggagtgtccctgagccacaacacccagcagtggggagatgtgctgcctgatggaaatggcacctaccagacctgggtggccacccgcatccggcagggcgaggagcagcgcttcacctgctacatggagcacagcggcaaccacggcacccaccctgtgcccagcggcaaggccctggtgctgcagagccagaggacagacttcccctacgtgtctgctgccatgccctgcttcgtcatcatcatcatcctgtgtgtgccctgctgcaagaagaagaccagcgctgctgagggccctgagctggtgtccctgcaggtgctggaccagcaccctgtgggcaccggggaccacagagatgctgcccagctgggcttccagcccctgatgtctgccaccggcagcacaggcagcacagagggcgcctag

SEQ ID NO: 345073 - DNA, 1056 bp, Artificial Sequence
  derived and/or modified sequence
atggtgctgagccaggacggcagcgtgcagagcggcttcctggccgaaggacacttagatgggcagccttttctgcggtacgatagacaaaagagacgcgccaaacctcagggccagtgggcagaggatgtgctcggagccgagacatgggataccgagactgaggacctgaccgagaacgggcaggacttgcgaagaactctgacccacataaaagaccaaaagggggggctgcatagccttcaggaaattcgtgtgtgtgagattcatgaagacagtagcactcgcggttcccgccacttctactataacggcgagctgttcctgagccagaacctcgagacccaggaaagcacagtgccccagtcttcccgggcacagactttagctatgaatgtgactaatttctggaaggaggatgccatgaaaaccaagactcactatcgggccatgcaggccgactgcctccagaaactgcagaggtacctaaaatccggggtcgctatccggaggactgtgcctccaatggtgaatgtgacctgcagcgaggtgtccgagggcaacatcacagtcacctgcagagcctcctctttttatcctcgtaatattaccctcacctggagacaggatggagtgagcctgagccataacactcagcagtggggtgacgtactgcctgatggaaacggcacatatcaaacgtgggtggctacacgcattcggcaaggtgaagaacagcggttcacgtgttacatggaacatagcggaaaccacggcactcacccagtgcccagtggcaaggccctggtacttcagtcacagcgtactgattttccctatgtgagtgcagctatgccctgttttgtcatcatcataatattatgcgtgccttgttgcaaaaagaagacctcagctgcagaggggcctgagcttgtgtccctccaggtcctggatcagcatccagttggcacgggagaccacagagatgctgctcagctcgggttccagccgctaatgtccgctaccggcagcaccggttccaccgaaggtgcctag

SEQ ID NO: 345074 - DNA, 1056 bp, Artificial Sequence
  derived and/or modified sequence
atggtcctgagccaggacggcagtgtgcagtccggattcctggccgagggccatcttgatggacagcccttcctccggtacgacaggcagaagcgcagggcgaagccacagggccaatgggcagaggacgtacttggcgctgaaacttgggacaccgagaccgaagacttgacagaaaatgggcaagatctccggcgtaccttgacccatatcaaggaccagaagggaggactgcattctcttcaagaaattagagtctgtgaaattcacgaggactcatcgactagagggtctaggcacttttactacaatggagagcttttcttgtctcaaaatctcgagactcaggagagcacagtgccccaaagtagccgcgcacagactctggctatgaacgtcacaaatttttggaaggaggatgccatgaagacgaaaactcattatcgggcaatgcaagccgattgcctccagaaattgcagcgttacctgaaaagtggggtggccattaggcgcacggtgcctccaatggtcaacgtgacctgcagcgaagtgagcgaaggtaacattaccgtcacgtgcagagctagtagtttttacccgagaaatattaccctgacctggcgtcaggacggagtctccctctcgcataatactcagcagtggggagacgtcctgcctgacggtaatggtacttaccagacctgggttgctacaagaattcggcagggcgaggagcaacgatttacatgttatatggaacactccgggaatcacggtacccacccagtgccctcaggtaaagcccttgtgctgcaatcacagcgcaccgactttccatatgtgagtgccgctatgccctgttttgttataattattattctctgcgtgccatgttgtaagaaaaaaacttctgctgccgagggacctgaactggtctcgctccaggtgcttgaccagcacccagtgggaaccggtgaccaccgagacgccgctcagcttggcttccaaccgcttatgtcagccaccggctctactggctcaaccgagggggcttag

SEQ ID NO: 345075 - DNA, 1056 bp, Artificial Sequence
  derived and/or modified sequence
atggtgctgagccaggacggcagcgtgcagagcggcttcctggccgagggccacctggacggccagcccttcctgagatacgacagacagaagagaagagccaagccccagggccagtgggccgaggacgtgctgggcgccgagacctgggacaccgagaccgaggacctgaccgagaacggccaggacctgagaagaaccctgacccacatcaaggaccagaagggcggcctgcacagcctgcaggagatcagagtgtgcgagatccacgaggacagcagcaccagaggcagcagacacttctactacaacggcgagctgttcctgagccagaacctggagacccaggagagcaccgtgccccagagcagcagagcccagaccctggccatgaacgtgaccaacttctggaaggaggacgccatgaagaccaagacccactacagagccatgcaggccgactgcctgcagaagctgcagagatacctgaagagcggcgtggccatcagaagaaccgtgccccccatggtgaacgtgacctgcagcgaggtgagcgagggcaacatcaccgtgacctgcagagccagcagcttctaccccagaaacatcaccctgacctggagacaggacggcgtgagcctgagccacaacacccagcagtggggcgacgtgctgcccgacggcaacggcacctaccagacctgggtggccaccagaatcagacagggcgaggagcagagattcacctgctacatggagcacagcggcaaccacggcacccaccccgtgcccagcggcaaggccctggtgctgcagagccagagaaccgacttcccctacgtgagcgccgccatgccctgcttcgtgatcatcatcatcctgtgcgtgccctgctgcaagaagaagaccagcgccgccgagggccccgagctggtgagcctgcaggtgctggaccagcaccccgtgggcaccggcgaccacagagacgccgcccagctgggcttccagcccctgatgagcgccaccggcagcaccggcagcaccgagggcgcctag

SEQ ID NO: 345076 - protein, 140 aa, Artificial Sequence
  derived and/or modified sequence
MFPPSGSTGLIPPSHFQARPLSTLPRMAPTWLSDIPLVQPPGHQDVSERRLDTQRPQVTMWERDVSSDRQEPGRRGRSWGLEGSQALSQQAEVIVRQLQELRRLEEEVRLLRETSLQQKMRLEAQAMELEALARAEKAGR

SEQ ID NO: 345077 - protein, 158 aa, Artificial Sequence
  derived and/or modified sequence
MFPPSGSTGLIPPSHFQARPLSTLPRMAPTWLSDIPLVQPPGHQDVSERRLDTQRPQVTMWERDVSSDRQEPGRRGRSWGLEGSQALSQQAEVIVRQLQELRRLEEEVRLLRETSLQQKMRLEAQAMELEALARAEKAGRAEAEGLRAALAGAEVVRK

SEQ ID NO: 345078 - protein, 41 aa, Artificial Sequence
  derived and/or modified sequence
MFPPSGSTGLIPPSHFQARPLSTLPRMAPTWLSDIPLVQPP

SEQ ID NO: 345079 - protein, 159 aa, Artificial Sequence
  derived and/or modified sequence
MFPPSGSTGLIPPSHFQARPLSTLPRMAPTWLSDIPLVQPPGHQDVSERRLDTQRPQVTMWERDVSSDRQEPGRRGRSWGLEGSQALSQQAEVIVRQLQELRRLEEEVRLLRETSLQQKMRLEAQAMELEALARAEKAGRAEAEGLRAALAGAEVVRKN

SEQ ID NO: 345080 - protein, 782 aa, Artificial Sequence
  derived and/or modified sequence
MFPPSGSTGLIPPSHFQARPLSTLPRMAPTWLSDIPLVQPPGHQDVSERRLDTQRPQVTMWERDVSSDRQEPGRRGRSWGLEGSQALSQQAEVIVRQLQELRRLEEEVRLLRETSLQQKMRLEAQAMELEALARAEKAGRAEAEGLRAALAGAEVVRKNLEEGRQRELEEVQRLHQEQLSSLTQAHEEALSSLTSKAEGLEKSLSSLETRRAGEAKELAEAQREAELLRKQLSKTQEDLEAQVTLVENLRKYVGEQVPSEVHSQTWELERQKLLDTMQHLQEDRDSLHATAELLQVRVQSLTHILALQEEELTRKVQPSDSLEPEFTRKCQSLLNRWREKVFALMVQLKAQELEHSDSVKQLKGQVASLQEKVTSQSQEQAILQRSLQDKAAEVEVERMGAKGLQLELSRAQEARRRWQQQTASAEEQLRLVVNAVSSSQIWLETTMAKVEGAAAQLPSLNNRLSYAVRKVHTIRGLIARKLALAQLRQESCPLPPPVTDVSLELQQLREERNRLDAELQLSARLIQQEVGRAREQGEAERQQLSKVAQQLEQELQQTQESLASLGLQLEVARQGQQESTEEAASLRQELTQQQELYGQALQEKVAEVETRLREQLSDTERRLNEARREHAKAVVSLRQIQRRAAQEKERSQELRRLQEEARKEEGQRLARRLQELERDKNLMLATLQQEGLLSRYKQQRLLTVLPSLLDKKKSVVSSPRPPECSASAPVAAAVPTRESIKGSLSVLLDDLQDLSEAISKEEAVCQGDNLDRCSSSNPQMSS

SEQ ID NO: 345081 - protein, 729 aa, Artificial Sequence
  derived and/or modified sequence
MFPPSGSTGLIPPSHFQARPLSTLPRMAPTWLSDIPLVQPPGHQDVSERRLDTQRPQVTMWERDVSSDRQEPGRRGRSWGLEGSQALSQQAEVIVRQLQELRRLEEEVRLLRETSLQQKMRLEAQAMELEALARAEKAGRAEAEGLRAALAGAEVVRKNLEEGRQRELEEVQRLHQEQLSSLTQAHEEALSSLTSKAEGLEKSLSSLETRRAGEAKELAEAQREAELLRKQLSKTQEDLEAQVTLVENLRKYVGEQVPSEVHSQTWELERQKLLDTMQHLQEDRDSLHATAELLQVRVQSLTHILALQEEELTRKVQPSDSLEPEFTRKCQSLLNRWREKVFALMVQLKAQELEHSDSVKQLKGQVASLQEKVTSQSQEQAILQRSLQDKAAEVEVERMGAKGLQLELSRAQEARRRWQQQTASAEEQLRLVVNAVSSCPLPPPVTDVSLELQQLREERNRLDAELQLSARLIQQEVGRAREQGEAERQQLSKVAQQLEQELQQTQESLASLGLQLEVARQGQQESTEEAASLRQELTQQQELYGQALQEKVAEVETRLREQLSDTERRLNEARREHAKAVVSLRQIQRRAAQEKERSQELRRLQEEARKEEGQRLARRLQELERDKNLMLATLQQEGLLSRYKQQRLLTVLPSLLDKKKSVVSSPRPPECSASAPVAAAVPTRESIKGSLSVLLDDLQDLSEAISKEEAVCQGDNLDRCSSSNPQMSS

SEQ ID NO: 345082 - protein, 188 aa, Artificial Sequence
  derived and/or modified sequence
MFPPSGSTGLIPPSHFQARPLSTLPRMAPTWLSDIPLVQPPGHQDVSERRLDTQRPQVTMWERDVSSDRQEPGRRGRSWGLEGSQALSQQAEVIVRQLQELRRLEEEVRLLRETSLQQKMRLEAQAMELEALARAEKAGRAEAEGLRAALAGAEVVRKNLEEGRQRELEEVQRLHQEQLSSLTQAHEE

SEQ ID NO: 345083 - DNA, 2349 bp, Artificial Sequence
  derived and/or modified sequence
atgttcccccccagcggcagcaccggcctgatcccccccagccacttccaggccagacccctgagcaccctgcccagaatggcccccacctggctgagcgacatccccctggtgcagccccccggccaccaggacgtgagcgagagaagactggacacccagagaccccaggtgaccatgtgggagagagacgtgagcagcgacagacaggagcccggcagaagaggcagaagctggggcctggagggcagccaggccctgagccagcaggccgaggtgatcgtgagacagctgcaggagctgagaagactggaggaggaggtgagactgctgagagagaccagcctgcagcagaagatgagactggaggcccaggccatggagctggaggccctggccagagccgagaaggccggcagagccgaggccgagggcctgagagccgccctggccggcgccgaggtggtgagaaagaacctggaggagggcagacagagagagctggaggaggtgcagagactgcaccaggagcagctgagcagcctgacccaggcccacgaggaggccctgagcagcctgaccagcaaggccgagggcctggagaagagcctgagcagcctggagaccagaagagccggcgaggccaaggagctggccgaggcccagagagaggccgagctgctgagaaagcagctgagcaagacccaggaggacctggaggcccaggtgaccctggtggagaacctgagaaagtacgtgggcgagcaggtgcccagcgaggtgcacagccagacctgggagctggagagacagaagctgctggacaccatgcagcacctgcaggaggacagagacagcctgcacgccaccgccgagctgctgcaggtgagagtgcagagcctgacccacatcctggccctgcaggaggaggagctgaccagaaaggtgcagcccagcgacagcctggagcccgagttcaccagaaagtgccagagcctgctgaacagatggagagagaaggtgttcgccctgatggtgcagctgaaggcccaggagctggagcacagcgacagcgtgaagcagctgaagggccaggtggccagcctgcaggagaaggtgaccagccagagccaggagcaggccatcctgcagagaagcctgcaggacaaggccgccgaggtggaggtggagagaatgggcgccaagggcctgcagctggagctgagcagagcccaggaggccagaagaagatggcagcagcagaccgccagcgccgaggagcagctgagactggtggtgaacgccgtgagcagcagccagatctggctggagaccaccatggccaaggtggagggcgccgccgcccagctgcccagcctgaacaacagactgagctacgccgtgagaaaggtgcacaccatcagaggcctgatcgccagaaagctggccctggcccagctgagacaggagagctgccccctgcccccccccgtgaccgacgtgagcctggagctgcagcagctgagagaggagagaaacagactggacgccgagctgcagctgagcgccagactgatccagcaggaggtgggcagagccagagagcagggcgaggccgagagacagcagctgagcaaggtggcccagcagctggagcaggagctgcagcagacccaggagagcctggccagcctgggcctgcagctggaggtggccagacagggccagcaggagagcaccgaggaggccgccagcctgagacaggagctgacccagcagcaggagctgtacggccaggccctgcaggagaaggtggccgaggtggagaccagactgagagagcagctgagcgacaccgagagaagactgaacgaggccagaagagagcacgccaaggccgtggtgagcctgagacagatccagagaagagccgcccaggagaaggagagaagccaggagctgagaagactgcaggaggaggccagaaaggaggagggccagagactggccagaagactgcaggagctggagagagacaagaacctgatgctggccaccctgcagcaggagggcctgctgagcagatacaagcagcagagactgctgaccgtgctgcccagcctgctggacaagaagaagagcgtggtgagcagccccagaccccccgagtgcagcgccagcgcccccgtggccgccgccgtgcccaccagagagagcatcaagggcagcctgagcgtgctgctggacgacctgcaggacctgagcgaggccatcagcaaggaggaggccgtgtgccagggcgacaacctggacagatgcagcagcagcaacccccagatgagcagctag

SEQ ID NO: 345084 - DNA, 2190 bp, Artificial Sequence
  derived and/or modified sequence
atgttcccccccagcggcagcaccggcctgatcccccccagccacttccaggccagacccctgagcaccctgcccagaatggcccccacctggctgagcgacatccccctggtgcagccccccggccaccaggacgtgagcgagagaagactggacacccagagaccccaggtgaccatgtgggagagagacgtgagcagcgacagacaggagcccggcagaagaggcagaagctggggcctggagggcagccaggccctgagccagcaggccgaggtgatcgtgagacagctgcaggagctgagaagactggaggaggaggtgagactgctgagagagaccagcctgcagcagaagatgagactggaggcccaggccatggagctggaggccctggccagagccgagaaggccggcagagccgaggccgagggcctgagagccgccctggccggcgccgaggtggtgagaaagaacctggaggagggcagacagagagagctggaggaggtgcagagactgcaccaggagcagctgagcagcctgacccaggcccacgaggaggccctgagcagcctgaccagcaaggccgagggcctggagaagagcctgagcagcctggagaccagaagagccggcgaggccaaggagctggccgaggcccagagagaggccgagctgctgagaaagcagctgagcaagacccaggaggacctggaggcccaggtgaccctggtggagaacctgagaaagtacgtgggcgagcaggtgcccagcgaggtgcacagccagacctgggagctggagagacagaagctgctggacaccatgcagcacctgcaggaggacagagacagcctgcacgccaccgccgagctgctgcaggtgagagtgcagagcctgacccacatcctggccctgcaggaggaggagctgaccagaaaggtgcagcccagcgacagcctggagcccgagttcaccagaaagtgccagagcctgctgaacagatggagagagaaggtgttcgccctgatggtgcagctgaaggcccaggagctggagcacagcgacagcgtgaagcagctgaagggccaggtggccagcctgcaggagaaggtgaccagccagagccaggagcaggccatcctgcagagaagcctgcaggacaaggccgccgaggtggaggtggagagaatgggcgccaagggcctgcagctggagctgagcagagcccaggaggccagaagaagatggcagcagcagaccgccagcgccgaggagcagctgagactggtggtgaacgccgtgagcagctgccccctgcccccccccgtgaccgacgtgagcctggagctgcagcagctgagagaggagagaaacagactggacgccgagctgcagctgagcgccagactgatccagcaggaggtgggcagagccagagagcagggcgaggccgagagacagcagctgagcaaggtggcccagcagctggagcaggagctgcagcagacccaggagagcctggccagcctgggcctgcagctggaggtggccagacagggccagcaggagagcaccgaggaggccgccagcctgagacaggagctgacccagcagcaggagctgtacggccaggccctgcaggagaaggtggccgaggtggagaccagactgagagagcagctgagcgacaccgagagaagactgaacgaggccagaagagagcacgccaaggccgtggtgagcctgagacagatccagagaagagccgcccaggagaaggagagaagccaggagctgagaagactgcaggaggaggccagaaaggaggagggccagagactggccagaagactgcaggagctggagagagacaagaacctgatgctggccaccctgcagcaggagggcctgctgagcagatacaagcagcagagactgctgaccgtgctgcccagcctgctggacaagaagaagagcgtggtgagcagccccagaccccccgagtgcagcgccagcgcccccgtggccgccgccgtgcccaccagagagagcatcaagggcagcctgagcgtgctgctggacgacctgcaggacctgagcgaggccatcagcaaggaggaggccgtgtgccagggcgacaacctggacagatgcagcagcagcaacccccagatgagcagctag

SEQ ID NO: 345085 - DNA, 2349 bp, Artificial Sequence
  derived and/or modified sequence
atgttcccccctagcggatccacaggcctcatcccgccatcacacttccaggctcggccactaagtactctgcctcgaatggctcctacttggctgtccgatatcccactggtgcagcctccagggcatcaggacgtgtccgaaagaaggcttgacactcagcgccctcaagtgaccatgtgggagcgggatgtgtcttccgacaggcaggagcctgggaggaggggcagaagctggggtttggagggctcccaagcgttgtcacagcaggcagaagtaatcgtgcggcagcttcaagaactgcggcgcttggaggaggaagtacgcctgctgcgcgaaactagcctgcagcagaaaatgcgacttgaggcacaagccatggagctggaggccctggcacgggcggaaaaggcaggccgcgcggaagctgaaggactgcgtgccgcactcgccggcgcagaggtggttaggaagaatctggaggagggccgccagcgcgaattagaggaggtgcagcgcctacaccaggagcagctttcatcgcttacacaggcacatgaggaggcattgagttctctgacatccaaggcagaaggtttggagaagtctctgtctagcctcgaaacccggagagctggggaggcaaaagagctggccgaggcacagcgcgaagctgagctgctccgcaaacagctgtctaaaacccaggaggacttggaggcccaggtcaccctcgtggaaaatctgcgcaagtatgtcggtgagcaggtgccctcagaagtgcatagtcagacctgggagttagagagacagaagctgctggatacaatgcagcacctgcaggaggatagagactcacttcatgcaaccgctgagcttcttcaggtgcgcgtgcagagtctgacccacattctggccttgcaagaggaggagctgactaggaaggtgcagccgtcagactccctggagcccgaatttacgcgcaaatgccagtctctcctcaaccgttggagagaaaaagttttcgccctgatggtgcagctgaaggcacaagagttggaacatagtgattcggtcaaacagcttaaagggcaagtagcttcattacaggagaaggtgacgtcccagagtcaggaacaagccatcctacagcggtctcttcaagataaggcagcagaagtcgaagtggagagaatgggagcgaaaggtctgcagttggaactgtccagagctcaggaggctcggcgacgatggcaacagcagacagccagtgccgaagagcaacttaggctggtcgtaaacgccgtgagcagcagccagatctggctcgaaaccaccatggccaaagtagagggagccgcggcccagcttccgagtcttaacaataggttgagttatgctgtaaggaaggtccataccatccgcggactcatcgccaggaaactcgctttggcccagctgcgccaggagagctgtccattgccacctccagttaccgacgtatcactggagctgcagcaattaagagaagagcggaatagattggacgcagagttacaactgtccgctagactgatccagcaggaagttgggcgcgcaagagaacagggcgaggctgagcgacaacaactgtcaaaagttgcccaacaactagaacaggaactacagcagacccaggagtcactcgccagcttaggactgcagctggaagtagctcgacagggccagcaggaaagcacagaagaggctgcctccttaaggcaggaactaacacaacagcaggagctctacggtcaagccctgcaggaaaaggtggcagaggttgagacccgcttacgagaacagctcagtgacacagaaagaaggttgaacgaagcaaggagggagcatgcgaaagctgttgtaagccttagacagattcaaaggcgcgccgcccaagaaaaagaaaggtcccaggagctgcgaagactgcaggaagaggcacggaaggaggagggtcagcgcctggccagacggttgcaggaactggagagggacaaaaacctcatgctggccaccctgcaacaggaggggctgttaagccgatataaacaacagagactgttaaccgttctgccttcacttctcgataaaaagaagagcgtcgtcagttcgcccagaccccctgaatgcagcgcaagcgcaccagtggccgccgcagttcccactagagagagcatcaaggggtcattgtccgttttgttggatgatctgcaagatctgtctgaggccattagtaaggaggaagcggtatgccaaggagacaatctggaccgctgttcctcatctaacccgcaaatgtctagctag

SEQ ID NO: 345086 - DNA, 2349 bp, Artificial Sequence
  derived and/or modified sequence
atgttcccaccaagtgggtcgaccggattgatacctccgtcccacttccaggccagacccctgagtactctccccaggatggcccctacatggctgtccgatattccattggtgcagcctccaggccaccaggatgtaagtgagagaaggctggatacacagagaccacaggtgaccatgtgggaacgtgacgtcagcagcgaccgtcaggagcctgggaggagagggagatcttggggactagagggctcgcaggcattaagccagcaagcagaggtcatcgtgaggcagctccaggaactgagaaggttggaagaagaagtgcggttgctccgcgaaacctcgctgcagcagaagatgcggctggaggcccaagccatggagctggaggctctggctcgagcagaaaaagcagggagggccgaagccgagggccttagagcagccctcgcaggcgcagaggtcgtcagaaagaacctggaggaagggcggcaacgggagcttgaagaggtccagaggctgcaccaggaacagctgagctctttgactcaggcgcatgaagaggccctgtcttcattgacctccaaggcagaaggactcgaaaaatccctttcatccctggagacccggagggcaggagaggccaaggagttggcagaggcccagagggaggcggaactcctgagaaaacagctctccaaaacacaggaagatttagaggcacaagtgactttggtggagaatctccggaaatacgtgggcgaacaagtgccaagcgaggtacactcccagacgtgggaacttgagcgacaaaagctgttagataccatgcagcacctgcaagaagatagggactccctgcatgccactgcagagcttctacaggtgcgtgtccagagtctgacacatattttagccttacaagaagaggaactgactcgaaaggttcagccgagcgatagccttgaaccggagtttactagaaaatgccagtccctccttaatcgatggcgcgaaaaagtatttgctcttatggtgcagctgaaagcccaggaacttgagcattctgacagtgtcaagcagcttaaagggcaggtggcttctctccaggagaaagttacatcgcaatctcaggaacaagcgatcctgcagaggtctctccaggataaagctgctgaagtggaggtcgagcgaatgggcgcaaagggactgcaactggaacttagtcgcgcgcaagaagctagacggagatggcagcagcagactgccagcgctgaggagcagctgcgcctggtagtcaacgctgtgtcatcctcacagatttggcttgagaccactatggccaaggtcgaaggggccgctgcccagctcccaagcttgaataacaggctctcctacgcagttaggaaagtgcataccatcagggggcttatagctcgaaagctggctcttgcccagcttaggcaggagtcttgccctttgcctccccctgtcaccgatgtgagtttagaactgcagcagctccgcgaagagcgtaacaggctcgacgccgagctgcagctgtccgctcgcctcatccaacaggaagtgggaagggcgagggagcagggcgaagcagaacgccagcagctaagtaaagtggctcaacaactggaacaagagttgcagcagacacaagagagcctggcctcccttggcttacagcttgaggtggctcgtcaggggcagcaggagagcaccgaggaagctgcctccctcaggcaggagctaacacagcagcaggagctgtacggccaggcgctgcaagagaaggtggcggaggtggagacccgcctgagagagcagctcagtgacactgaacgtcggctcaacgaagcccgccgggagcacgccaaagcggtcgttagcttgcgccagattcagcggcgagccgcacaggagaaagaacgttcccaggaacttagacgacttcaggaggaggctagaaaggaggaaggtcagaggctcgccaggcgtttgcaggaactggagagagacaagaatctgatgttggcaacacttcagcaggagggactgctctctcgctacaagcaacaaaggctgctaacagttttgccctccttattggacaagaaaaagtcagtggtgagctctccgcgaccccccgagtgctctgccagtgcacccgttgcggccgcagtgccgacacgcgaatccattaaaggctcactcagtgtgctactggatgacttgcaagacctttctgaggctatttcaaaagaagaagccgtgtgtcagggtgataacctcgacagatgctcttcttctaatccgcaaatgtcctcttag

SEQ ID NO: 345087 - DNA, 2190 bp, Artificial Sequence
  derived and/or modified sequence
atgttcccaccaagcgggagcacagggcttattccaccatcccactttcaggccagacccctgtccacactaccccgaatggctcccacatggctcagcgatatcccgcttgttcaaccacctggacaccaggacgtgagcgagcgaaggctggatacacagcggcctcaggttacaatgtgggaaagggacgtgtcttctgacagacaggaacccgggcggaggggaaggtcttggggacttgagggctcccaggctctgagccagcaagctgaggtgattgtaaggcagcttcaggagctccggaggttggaggaggaggtgcgactacttagggagactagcctgcagcagaagatgaggcttgaggctcaggctatggaactcgaagctctggccagggcagagaaggcaggccgtgcggaggccgagggcctgagagcagccctggccggcgccgaggttgtcaggaagaatttagaggaaggcagacagagagaactggaggaggtgcagcggcttcatcaggagcagctgtcatccctcactcaggcccacgaagaggcattaagcagtctgacttcgaaagccgagggattggaaaaaagcttgtcgagtctcgagaccagacgggctggcgaggctaaagaactggctgaggcccagcgcgaagccgaactcttgaggaaacagctcagcaagactcaggaggatctagaggcccaagtgaccctcgtcgaaaatctgagaaaatatgtcggagaacaagtccctagcgaggtgcattctcagacatgggagctggaacgccagaaattattagatactatgcaacacctccaggaggacagggatagcctgcacgcaaccgccgagctgctccaggtgcgcgtgcaaagcctgacccatatattggccttgcaggaagaggaattaactcgaaaggttcagccatctgactctcttgaacccgagttcactagaaaatgtcagagcctgctcaatcgatggagagagaaggttttcgcattgatggtccagctgaaagcgcaggagctcgaacactccgattccgtgaagcagctgaaaggacaggtggcaagcctacaggagaaggtgacttcgcaaagccaggaacaggctattctgcagcgtagtcttcaagacaaggcagcggaagtagaggtggagcgaatgggggcaaaaggcctgcagctcgaactttctagagctcaggaagcccgccgaaggtggcaacagcagacggcctccgcagaggagcagctgcgactcgtcgtcaatgccgtgagctcctgtccactgccacctccagtgacagatgtctctctcgaactgcagcagttgcgagaggaacgcaatcggttagacgctgagctccagttgtccgccagacttatccagcaggaggtgggccgcgcgcgtgagcagggcgaggccgagcgccaacagctctctaaagtcgcccaacaactggaacaggaactccagcagacccaggaaagtttagcttctctgggtttgcagctggaagtagctcgccagggacagcaggaatcgaccgaggaggccgcctctttacgtcaagagcttacgcagcagcaggaactctacggccaagcactgcaggaaaaagtggccgaggttgaaaccaggctccgtgagcagctgagtgacacagagcgacggcttaatgaggccagaagagaacatgccaaagctgtggtgagcctgaggcagatccagcgaagagctgctcaggagaaagagcgatcacaagaattgaggagactgcaggaagaggccaggaaagaggaaggccagcggttggcgaggagattgcaagagctggaaagagataaaaacctgatgctagccacacttcagcaggagggcctactcagcagatacaagcagcagaggctactgaccgttctcccttcattgctggacaagaagaaatcagtagtgagcagtcccaggcctccagagtgcagcgcatccgcaccagtggcagctgcagtccccacaagggagagtattaaagggtccctgtcagtgcttctggatgatctccaagacttatctgaggcgatctccaaggaagaagctgtgtgccagggggacaatctggataggtgttcctctagcaatccccagatgtcctcctag

SEQ ID NO: 345088 - DNA, 2349 bp, Artificial Sequence
  derived and/or modified sequence
atgttcccacccagcggctctaccggcctcattcctccgtctcattttcaagcgcggcccctgtcaaccctgccgcgcatggcccctacttggctgtctgatatcccattggtgcagccccctggtcaccaggacgtgtctgaaagacggctcgatacccagcggcctcaagtgactatgtgggagcgcgatgtctcaagtgacagacaggagcccgggcgcagagggcgtagttggggcttagaagggagtcaagccctgtctcagcaggccgaggtgattgtgcgacaactgcaggagctgcggaggctggaggaggaggtccggctgctccgggaaacctctctccagcagaagatgcggctggaggcgcaggccatggagttagaagccctggcacgagctgagaaggctggtcgcgcagaggcagaaggactgagagcagcactggcgggcgcggaggtcgttcggaaaaacctggaggaaggtcggcagcgtgaactggaagaagtccagcggcttcaccaagagcagctctcatccttgacccaggcgcacgaggaggccttgagctcactgacttcaaaagctgagggactggagaaaagtctgtcctccctagaaactaggcgtgcaggagaagcaaaagagctggccgaagcacagcgagaggcagaacttctcagaaagcaactgagcaagacccaggaagatctggaggctcaggtgacccttgtggaaaacctgcgcaaatatgtcggcgagcaggtaccctctgaggtgcactcccagacttgggaattggagcgacagaagttgttagacaccatgcagcacctccaagaggacagggacagccttcatgccacagctgagctgctacaggtccgagtacaatcactgacccacatactggcccttcaagaggaggagctgacccggaaggttcagccaagcgattctctggagcctgaattcacaagaaaatgccaaagcctgctcaaccggtggcgagaaaaggttttcgctttgatggtccagctgaaggcacaagagttagagcacagcgatagcgtcaagcagcttaagggacaagttgcgtcgcttcaagagaaagtcacttcacaatcccaggagcaggctatcttacaacgaagcctgcaggataaggcagccgaggttgaagtcgaacgcatgggggcgaaaggtctccaactagagctttctagggcacaggaggcccgcagacgatggcagcagcaaactgcttctgccgaagagcagctcaggctggttgtgaatgccgtctccagctcacagatatggctggaaacgacgatggccaaggtcgagggagcagccgcccagctgccatcactcaacaataggctctcctacgcagtgcggaaagtgcacaccattcgcggcctaattgccaggaagctggcattggctcagttgaggcaggagagctgccctttaccacctccggttacagacgttagcctggagcttcagcagctccgagaagaacggaaccgccttgacgccgagctgcagctgtcagctcgcctcatacagcaggaagtaggccgtgcacgtgagcagggtgaagcggaacgccagcagctgtccaaagttgcacaacaactggagcaggaactgcaacaaacacaggagagtctggcctccttggggttacagctagaggttgcccgtcaagggcaacaggagagcacagaagaagctgccagcttgcggcaagaattgacccagcagcaggagctgtacgggcaggccttgcaggagaaggtggctgaggtggaaacaagacttcgagaacagctcagcgatactgagaggcggctcaacgaggcacggcgggaacacgccaaagccgtagttagcttgaggcagattcaacgaagggccgcccaggaaaaggaaagaagccaggaactgcggcgtttgcaggaggaggctagaaaggaagaaggtcaaaggctagcgcgccgcctccaggagctggagcgcgacaaaaatttgatgctcgcaactctccagcaggaggggttacttagcagatacaagcagcagagacttcttaccgttctccctagcctgttggataaaaaaaagtcagtggttagctcacccaggcctcctgagtgcagcgcgtccgcgcccgttgccgccgctgtccccactcgagagagcattaagggctccctctctgtcttacttgacgatttacaagatctgtcagaagccatttccaaggaagaggctgtgtgccagggggacaatttggataggtgtagctcctcaaacccacaaatgtcttcgtag

SEQ ID NO: 345089 - DNA, 2349 bp, Artificial Sequence
  derived and/or modified sequence
atgttcccacctagtggatcaactggacttataccaccatcacattttcaggcccgccctctgtctactcttccgagaatggccccgacctggctgtctgacatccccttggtgcaacctccaggccatcaggacgtgtccgagaggcggttggatacccagagaccccaggttaccatgtgggaacgagacgtgagttccgacagacaggagcctggacgccgtggccgctcctggggcctcgaaggaagccaagctctgagccagcaggcagaggtcatcgtgcgacaattgcaggagctgcgccgcctggaagaggaggtccggcttctccgtgagaccagcctccagcagaagatgcgtctggaggctcaagctatggagctggaagctctggccagggctgaaaaggcgggcagggcagaggccgaaggcctccgagccgccctggctggagccgaggtggtcagaaaaaacctcgaggagggtcgtcagagggaactcgaggaggtccaacgactccatcaggaacagctttcctctcttacgcaggcccacgaagaagcactgtccagtctgacgagcaaggccgaagggctcgaaaaaagcctgtcatctctcgaaactcggagggcaggtgaggccaaagaattggccgaagcccagagagaggcagaactacttcgcaaacagcttagtaagacccaggaggatctggaggcacaagtgactctggtagagaacctgcgcaaatacgtgggcgaacaggtacccagtgaagtccattcccagacatgggagctggaacgacaaaaattactggacaccatgcagcacctccaggaggaccgggatagtctacatgccactgcggagcttctccaggtgcgggtgcagtccttgactcatattctcgccctacaggaggaagaactcacaaggaaggtgcagccaagtgattccttagaacctgaatttacacggaaatgccagtccctgctgaaccgatggagggagaaagtgtttgcactcatggtccagttaaaggcacaggaactcgaacactccgatagcgtgaaacaactcaagggtcaggtggctagccttcaggagaaggtcacatcgcagagtcaagaacaggcgatactgcagagatcattgcaggacaaggctgccgaagtggaagtcgaacgcatgggtgcgaaagggttgcaactggagttgtcacgggcccaagaagcgaggcggagatggcagcagcagaccgcctctgcggaggagcagctgaggctggtggtcaatgctgtctcttcctcccagatctggttggaaaccacaatggctaaggtggaaggggccgctgcgcaacttcctagccttaataatagattgagttatgccgtgcgtaaggtacatactatccgtggcctcatcgcacggaaactggcactagcccaactgaggcaagaatcttgtcccttgccccctccagtgactgatgtctctctggaactgcagcagctgagggaggaaaggaaccggctggatgctgaactccagctaagcgctcgtttgattcagcaggaggtagggagagctcgcgagcagggagaggccgagcgtcaacagctgagtaaggtggctcaacaactggagcaggagttgcagcaaacgcaggagtctctggcctcccttggtcttcaactcgaggtcgctcggcagggacagcaggagtcaaccgaagaggccgccagcttgcggcaagagctgactcagcagcaggagttatatggccaggctctccaagaaaaagtggccgaagtagagactcgactgcgtgaacaacttagcgacactgagcggagactcaatgaagccaggcgagaacatgctaaggcagtggtcagcctcaggcagatacagagaagagcggctcaggaaaaggaacgatcccaggaactccgacgacttcaggaggaggccaggaaagaagaaggtcagagactggcacggcgcttgcaagaactggaaagggacaagaatcttatgctcgcaactctgcaacaggaggggctcctcagtcggtataagcagcagagattgctcaccgttttaccaagtctgcttgacaaaaaaaagtccgtggtgtcttccccccggcccccggaatgcagtgccagcgcacctgttgcagccgccgtccccacccgagaatccattaaaggatctctctccgttttgctggacgaccttcaggacttgagtgaagctatcagcaaggaggaagcggtgtgtcagggggataacctggacaggtgttctagctctaaccctcagatgtcatcttag

SEQ ID NO: 345090 - DNA, 2190 bp, Artificial Sequence
  derived and/or modified sequence
atgtttcctcccagcggatcaacgggacttatcccaccaagccacttccaggctaggccgttgagcacgctcccacgcatggctccaacctggcttagtgacatacctctggtgcagcctccgggccatcaggacgttagcgagcggcgtctcgatacacaaagaccccaagtcacaatgtgggagcgcgatgtttcttctgataggcaggagcccgggcgccgcggacgcagctgggggctggagggcagccaggccctttcacagcaggcagaggtgatcgtccgccagctccaagagttgcgccggctcgaagaggaagtacggttgctgagagagacctctttacagcaaaagatgcgtctggaagcgcaggctatggagttggaggctctggcccgcgctgagaaggctggcagggccgaagcagagggtctacgcgcagctcttgcgggggctgaagtggtccgaaagaacctagaagaagggaggcagagagagctcgaagaggtacagaggctgcatcaggagcagcttagcagcctcacacaggcacacgaggaagctctgagttccttaacatctaaggctgaggggctggaaaagtcactttcctcgctggagacccggagagctggtgaagctaaggaattagctgaagcgcagagagaggccgagctgctaaggaagcagctcagtaagactcaagaagacctggaagctcaggtcactctagttgagaacttaagaaaatatgtgggagagcaagtgccctcagaggtccactctcaaacctgggagttggagcgtcaaaagttgctggatactatgcagcatctgcaagaagatcgcgatagcctccacgcaactgctgaattactgcaggttagagttcagagtttgactcacatactcgccctccaggaagaggaactgacacgaaaggtgcagccctcagacagtctcgagccagagtttacacgcaagtgtcaatctctgctgaatcgctggcgcgaaaaagtgttcgcgttgatggtgcagctcaaggcccaagaactggagcattccgattcagtcaaacagctaaaaggccaagtggcatccctgcaggaaaaagtaacctcacaatcacaggagcaggctattctgcagagaagtctgcaggacaaagcagctgaagtcgaggtggagaggatgggggctaaaggcttacagctagagttgagtcgagctcaggaagcaagaaggagatggcaacagcaaacggcaagcgccgaggagcaactgaggcttgtggttaatgccgtgtcttcttgtcccctcccccctcccgtaaccgacgtgagtctggaactccagcaactgcgagaggagaggaacagactcgacgcagaactccagttatccgctcggcttatccagcaagaggtgggacgcgctagagaacagggcgaagccgaaagacagcagctctctaaggtcgcccagcagcttgaacaagaactacagcagacccaagagagtctagcttcgctgggcctgcaactggaagtggcccgacaaggtcagcaagagagtacagaagaggccgccagcctccgacaggaactgacgcaacagcaggagctgtatgggcaggccctacaggagaaggtcgctgaggtcgaaacacggctgcgtgagcagttaagtgacaccgagcggcgactcaatgaggccaggagggagcatgcgaaagctgtggtctccctgcgacagatccaacgcagggcagcccaggaaaaagagagaagccaggaattgagaagactccaggaagaggctcgcaaagaggagggccagcggcttgcacggaggctgcaagagcttgaacgggacaaaaacttgatgctggccacactacagcaggagggccttctctcaaggtacaagcagcagcggttgctgaccgtgctcccaagcctattggacaagaagaagtctgttgtgtcatcccccagaccaccggagtgtagcgcgagcgcgcctgtcgctgctgccgtgccgaccagagaatccattaaaggctcattgtcggtcctcctagacgatttgcaggacctaagcgaggctatctctaaggaggaggccgtgtgccaaggtgataatcttgacaggtgtagttcctctaacccccagatgagttcgtag

SEQ ID NO: 345091 - DNA, 2349 bp, Artificial Sequence
  derived and/or modified sequence
atgtttcctccttctggcagcacaggcctcatcccccccagccacttccaggcccggcccctgagcaccctgcccaggatggcccccacctggctgagtgacatccccctggtgcagcccccaggccaccaggatgtgtctgaaagaaggctggacacccagaggccccaggtgaccatgtgggagagagatgtgtccagtgaccggcaggagcccggccggcggggccgctcctggggcctggagggcagccaggccctgagccagcaggccgaggtgattgtgcggcagctgcaggagctgcggcggctggaggaggaggtgcggctgctgcgggagaccagcctgcagcagaagatgaggctggaggcccaggccatggagctggaggccctggcccgggcagagaaggccggccgggcagaggccgagggcctgcgggccgccctggccggggctgaggtggtgaggaagaacctggaggagggccggcagcgggagctggaggaggtgcagaggctgcaccaggagcagctgagcagcctgacccaggcccacgaggaggccctgagcagcctgaccagcaaggccgagggcctggagaagagcctgagcagcctggagacccggcgggccggggaggccaaggagctggccgaggcccagcgggaggccgagctgctgaggaagcagctgagcaagacccaggaggacctggaggcccaggtgaccctggtggagaacctgaggaaatatgtgggggagcaggtgcccagcgaggtgcacagccagacctgggagctggagcggcagaagctgctggacaccatgcagcacctgcaggaggaccgggacagcctgcacgccacagctgagctgctgcaggtgcgggtgcagagcctgacccacatcctggccctgcaggaggaggagctgaccaggaaggtgcagcccagcgacagcctggagcctgagttcaccaggaagtgccagagcctgctgaaccgctggagggagaaggtgtttgccctgatggtgcagctgaaggcccaggagctggagcacagcgacagcgtgaagcagctgaagggccaggtggccagcctgcaggagaaggtgaccagccagagccaggagcaggccatcctgcagaggagcctgcaggacaaggctgctgaggtggaggtggagaggatgggcgccaagggcctgcagctggagctgagccgggcccaggaggcccggcggcgctggcagcagcagacagccagcgctgaggagcagctgcggctggtggtgaatgctgtgagcagcagccagatctggctggagaccaccatggccaaggtggagggcgccgccgcccagctgcccagcctgaacaaccggctgtcctatgctgtgaggaaggtgcacaccatccggggcctcatcgccaggaagctggccctggcccagctgcggcaggagagctgccccctgcccccacctgtgacagatgtgtccctggagctgcagcagctgcgggaggagaggaaccggctggatgctgagctgcagctgagcgcccggctcatccagcaggaggtgggccgggcccgggagcagggcgaggccgagcggcagcagctgagcaaggtggcccagcagctggagcaggagctgcagcagacccaggagagcctggccagcctgggcctgcagctggaggtggcccggcagggccagcaggagagcacagaggaggccgccagcctgcggcaggagctgacccagcagcaggagctgtatggccaggccctgcaggagaaggtggccgaggtggagacccggctgcgggagcagctgagtgacacagaaagaaggctgaatgaggcccggcgggagcacgccaaggctgtggtgtccctgcggcagatccagaggcgggccgcccaggagaaggagaggagccaggagctgcggcggctgcaggaggaggccaggaaggaggagggccagaggctggcccggcggctgcaggagctggagcgggacaagaacctgatgctggccaccctgcagcaggagggcctgctgagccgctacaagcagcagaggctgctgactgtgctgcccagcctgctggacaagaagaagtctgtggtgagcagcccccggcccccagaatgttctgccagcgcccctgtggccgctgctgtgcccacccgggagagcatcaagggcagcctgtctgtgctgctggatgacctgcaggacctgtctgaggccatcagcaaggaggaggccgtgtgccagggcgacaacctggaccgctgcagcagcagcaacccccagatgagcagctag

SEQ ID NO: 345092 - DNA, 2190 bp, Artificial Sequence
  derived and/or modified sequence
atgtttcctccttctggcagcacaggcctcatcccccccagccacttccaggcccggcccctgagcaccctgcccaggatggcccccacctggctgagtgacatccccctggtgcagcccccaggccaccaggatgtgtctgaaagaaggctggacacccagaggccccaggtgaccatgtgggagagagatgtgtccagtgaccggcaggagcccggccggcggggccgctcctggggcctggagggcagccaggccctgagccagcaggccgaggtgattgtgcggcagctgcaggagctgcggcggctggaggaggaggtgcggctgctgcgggagaccagcctgcagcagaagatgaggctggaggcccaggccatggagctggaggccctggcccgggcagagaaggccggccgggcagaggccgagggcctgcgggccgccctggccggggctgaggtggtgaggaagaacctggaggagggccggcagcgggagctggaggaggtgcagaggctgcaccaggagcagctgagcagcctgacccaggcccacgaggaggccctgagcagcctgaccagcaaggccgagggcctggagaagagcctgagcagcctggagacccggcgggccggggaggccaaggagctggccgaggcccagcgggaggccgagctgctgaggaagcagctgagcaagacccaggaggacctggaggcccaggtgaccctggtggagaacctgaggaaatatgtgggggagcaggtgcccagcgaggtgcacagccagacctgggagctggagcggcagaagctgctggacaccatgcagcacctgcaggaggaccgggacagcctgcacgccacagctgagctgctgcaggtgcgggtgcagagcctgacccacatcctggccctgcaggaggaggagctgaccaggaaggtgcagcccagcgacagcctggagcctgagttcaccaggaagtgccagagcctgctgaaccgctggagggagaaggtgtttgccctgatggtgcagctgaaggcccaggagctggagcacagcgacagcgtgaagcagctgaagggccaggtggccagcctgcaggagaaggtgaccagccagagccaggagcaggccatcctgcagaggagcctgcaggacaaggctgctgaggtggaggtggagaggatgggcgccaagggcctgcagctggagctgagccgggcccaggaggcccggcggcgctggcagcagcagacagccagcgctgaggagcagctgcggctggtggtgaatgctgtgagcagctgccccctgcccccacctgtgacagatgtgtccctggagctgcagcagctgcgggaggagaggaaccggctggatgctgagctgcagctgagcgcccggctcatccagcaggaggtgggccgggcccgggagcagggcgaggccgagcggcagcagctgagcaaggtggcccagcagctggagcaggagctgcagcagacccaggagagcctggccagcctgggcctgcagctggaggtggcccggcagggccagcaggagagcacagaggaggccgccagcctgcggcaggagctgacccagcagcaggagctgtatggccaggccctgcaggagaaggtggccgaggtggagacccggctgcgggagcagctgagtgacacagagcggcggctgaatgaggcccggcgggagcacgccaaggctgtggtgtccctgcggcagatccagaggagagctgcccaggagaaggagaggagccaggagctgcggcggctgcaggaggaggccaggaaggaggagggccagaggctggcccggcggctgcaggagctggagcgggacaagaacctgatgctggccaccctgcagcaggagggcctgctgagccgctacaagcagcagaggctgctgactgtgctgcccagcctgctggacaagaagaagtctgtggtgagcagcccccggcccccagagtgcagcgccagcgcccctgtggccgctgctgtgcccacccgggagagcatcaagggcagcctgtctgtgctgctggatgacctgcaggacctgtctgaggccatcagcaaggaggaggccgtgtgccagggcgacaacctggaccgctgcagcagcagcaacccccagatgagcagctag

SEQ ID NO: 345093 - DNA, 2349 bp, Artificial Sequence
  derived and/or modified sequence
atgttcccccccagcggcagcaccggcctgatcccccccagccactttcaggctcgccctctgagcactttgccgcgcatggctcctacatggctgagcgatattcctttggtgcagcctcctggacatcaggatgttagcgagcgtcgcctggatactcagcggcctcaggtgactatgtgggaaagagatgtgagctctgaccggcaggagcctggacgacgcgggcggtcctggggcctggaaggttcgcaggcactgtcccaacaagccgaggtaattgttcgccagttacaggaactgagaaggctggaggaagaggtgcgtttattgagagaaacctcgttgcagcagaagatgagactggaggcacaagccatggagctcgaagcattggcaagagccgagaaggccggaagggcagaggcagagggactccgcgctgctcttgcgggggccgaggtagtgaggaagaatctggaggaaggcagacagcgggaactggaggaagtgcagcgattgcaccaggagcagttgagttctcttacccaggcacatgaggaagcgctgtcaagtctgactagcaaagcagagggactggaaaagtctctgtcttcgctcgagacacgccgagccggcgaagcaaaggaactggcagaagctcagagagaggcagaactccttcggaagcagctgtctaaaacacaggaagatttggaagctcaagtgactctcgttgaaaatctgagaaaatacgtcggagagcaagtcccctccgaggttcactcgcagacctgggaacttgagcgccagaaactgctggacactatgcagcacctgcaggaagatcgagacagcctgcatgctacggccgagttgctgcaagtcagagttcagtcactcacgcacatcttggccttgcaggaagaagaactgacgcgcaaagttcagcctagcgactccctggaacctgagtttacaaggaaatgtcaaagtctgctgaataggtggcgggaaaaagtttttgctttgatggtgcagctgaaagctcaagaactcgaacactcggactctgtcaaacagttgaagggacaggtcgctagtcttcaggagaaggtcaccagccagtcgcaggaacaggcgatattgcaaagaagcctccaggacaaggccgccgaggtggaagtggaacgtatgggggcgaagggcctgcagctggagctgagcagagcacaggaggctaggcgccgttggcaacagcagactgcctccgctgaggaacagctcaggctagtggtgaatgctgtgtcaagctcccagatctggctcgagaccaccatggctaaagttgaaggtgctgctgcccagctgccaagtttgaataaccggttatcttatgccgttagaaaggtgcacacaatacgaggcttgatcgccagaaagctggccctcgcccaactgaggcaggaatcatgccccctgcctccacctgtgacagacgtcagcttggagctgcaacagctgagggaagagagaaaccgcctggacgcagaactccagctgtcagcgaggctgatacagcaggaggtcggtagggccagagaacaaggagaagccgaacggcagcagctgtcgaaagtcgctcagcagttagagcaagagttgcagcagactcaggaatccctggcctccctgggtctccagcttgaagtcgctagacaggggcagcaagaaagtacggaggaagccgcaagccttcgtcaggagcttacccagcagcaggagctgtacggccaggccctccaggagaaggttgcagaggtggagacccgactgcgagaacaactctcggacacggaacgacgtctgaacgaggcaaggagagagcatgccaaagccgtcgtatccctacgtcagatacagcggcgcgccgctcaggagaaagagcgatcccaggaacttcgccgcctccaagaagaggcccgaaaggaagagggacagcgcctggcacgccgtcttcaggagctggaaagggataagaatctcatgctcgcaacactgcaacaggaagggcttctgtctaggtataagcagcagcgcctcttaacagtactccccagcctgttggacaaaaagaagtcagtcgtgtcatcaccgagacctcctgaatgctctgcgagcgccccagtcgcggcagccgtgcctactagggagtctatcaagggcagtctgtccgtgcttttggatgacctccaggacttatccgaggccatctccaaggaggaggctgtgtgccaaggagataatttggatcggtgttctagctctaaccctcagatgagtagctag

SEQ ID NO: 345094 - DNA, 2349 bp, Artificial Sequence
  derived and/or modified sequence
atgttcccccccagcggcagcaccggcctgatcccccccagccactttcaggcgcggcccttgtccacgttacccagaatggcccccacctggctgtcagacataccattagtacagcctccgggacaccaagatgtgtcggaacgcagactggatactcaaaggccacaggtcactatgtgggagcgagatgtgagttccgacagacaggagcctggacggcggggaagatcctggggtctcgaaggctcccaagcactttcacagcaagcagaggtgatagtgcgccaactgcaggagctaaggaggctggaggaggaggtccgcttgctaagagagacctctctccaacagaaaatgagattagaggctcaggccatggagctagaggcgttggctagggccgaaaaagctgggagggccgaagcagagggcctgcgcgccgcactggcaggcgccgaagtagtgagaaagaatctcgaagaaggacgccagagagaacttgaagaggtacagcggctgcatcaggaacagctgtcatccttgactcaggctcacgaagaggcactctcaagcctgacctcgaaggccgaaggcctggagaaaagtctctctagcctggaaacgcgaagagccggggaggctaaagaactggccgaggcacagcgggaggcggagctcctgagaaaacagcttagtaagacccaggaagaccttgaggcccaagtgacgctggtggagaaccttaggaagtacgtgggcgaacaggtgccttccgaagttcactcacagacatgggaattagaaaggcagaagctgttggatactatgcagcacctccaggaggatagagactctctccacgccaccgccgagctgctgcaagtgcgcgtccaaagtctcactcatattttagcgctccaggaggaagagctgacccgtaaggttcagccctccgattcactcgaacctgagttcactagaaaatgccagagcctgttgaataggtggcgagagaaagtgttcgccctgatggtacagttaaaggctcaggagctggagcatagtgattctgtgaaacagctcaagggccaggttgcgagcctgcaagagaaggtcacttcccagtcacaggagcaggccatattacaacgaagcttgcaggacaaagccgcagaagtcgaggttgaacggatgggcgcaaagggtcttcagctggagctgagtagagcacaggaggctcggcggcggtggcaacagcagactgccagcgcggaggagcagctccgtctggtggtcaatgctgtctcttccagtcagatctggctcgagaccactatggctaaggtggagggtgccgccgcgcagctaccttccctgaacaaccggctgagctatgcggtgcggaaagttcataccatcagaggcttaatcgcccggaaactggcgttagctcagctgcgtcaggagtcatgtccgcttccccctcctgtgaccgatgtgtcattggagcttcaacaattgagggaggaaagaaaccgcctcgacgctgaactgcagcttagcgcacgccttatccagcaggaggtgggcagagcccgcgagcaaggcgaggcggagcggcaacagctttcaaaggtcgcacaacagctggagcaggagctgcaacagacccaagaatcacttgcttcactggggctgcaactcgaggtcgcaaggcaaggccaacaggagtctactgaggaagcagcctcactgcgccaggaactgactcaacaacaggagttatatggccaggcgcttcaggaaaaggttgccgaagtcgaaacccgcctaagggaacagttatcagatacggagcgtcggttaaacgaggcccggcgggagcacgccaaggccgtcgtgtccctcaggcagatacagaggagggccgcacaggaaaaggagcggagccaggaactgcgaagattgcaagaagaggcacggaaagaagaaggacaaagactagcgaggcgcctacaagagttagagcgggataagaatcttatgctggccactctccagcaggaaggactcttgtctcggtataagcagcagcggctcctgactgtcctgccctctttattggacaagaagaagagcgttgtttcgagccctcggccccctgagtgcagcgcctcagcaccagtagcagcagccgttcctacgagagagagcataaagggcagtctgtctgtactccttgacgacctccaggatctaagcgaagctatttccaaggaagaggcggtgtgccaaggagacaatctggatagatgctcgtcaagtaacccgcagatgtcatcctag

SEQ ID NO: 345095 - DNA, 2190 bp, Artificial Sequence
  derived and/or modified sequence
atgttcccccccagcggcagcaccggcctgatcccccccagccacttccaggcaagacccttaagcacactccctcggatggcaccaacctggctcagcgacatccccctggtgcagccaccaggacaccaggacgtttccgagcgtcgcctggacacgcagcggccacaggtcacgatgtgggagagagacgtgagtagcgaccgacaggaacccggacgccgtggcaggtcatggggacttgaaggatctcaggctctgtctcaacaggccgaagtgatcgtgcggcagttacaggagctgcggcggctcgaagaagaagtgcggttgctgcgggaaacttccctgcagcagaaaatgcgactagaagctcaggctatggaattggaggctctggctagagcagaaaaagcgggacgggccgaggcagaaggactccgcgccgcgcttgctggggctgaggtggtgcgcaagaatctcgaggaaggaaggcagcgcgagctggaagaagtgcagagactacaccaagagcaattgtcttcattaactcaagcacatgaagaggccctttcatccctgaccagtaaggccgagggactcgagaagagtctgagctcccttgaaacgcgacgggccggcgaggctaaagagctggccgaggcacaaagagaagcagaactcctgcgcaagcagttaagcaagacgcaggaggatctcgaggctcaagtcacacttgttgagaacctccggaagtatgtgggcgagcaagtccccagtgaagttcattcccaaacatgggaattggagaggcagaagctactcgataccatgcagcatctgcaagaagatcgcgattcccttcacgccactgccgaattacttcaggttcgggtgcagtcactgacgcatatcttagccctacaggaagaggaattaactaggaaggtgcagccaagtgactcgttagagcctgagtttactaggaagtgtcagagcttgctgaatagatggcgggaaaaggtattcgctttgatggtacaactgaaggctcaggagctggagcattctgacagtgtgaaacaacttaaagggcaagtagctagcttgcaagaaaaggttaccagtcagagtcaagaacaggcgatcctccagaggtccctgcaggataaagcagctgaggtggaggtggaacgtatgggtgccaagggcttgcagctcgaactgagcagggcccaggaggcaagaagaaggtggcagcaacagaccgcaagcgctgaagagcaactccggctggtggtcaacgcagtcagttcgtgccccctgcccccccccgtcacggacgtgtccttagaactccagcagcttcgcgaagagcgcaaccggctcgacgccgaactgcagctgagcgcgagactgattcagcaggaggtgggccgcgctagagagcagggcgaggccgagaggcaacagctatctaaagttgcacagcagcttgagcaggagctccagcagactcaagagtctctcgccagcctgggtctccaactggaggtcgccagacaggggcaacaagaatccactgaagaagccgctagcctgagacaagaattaacccagcagcaggagctgtacggccaggctctgcaggagaaggttgcagaggtggaaacacgcctgagggaacagctcagcgacaccgaaaggcggctgaacgaagctaggcgggagcacgcaaaggccgtggtttctctgagacagatacaacggagggcggcccaggagaaagaacgctcacaggagctgcgtcggttacaagaagaggcccggaaagaggaggggcagaggctggcacggcgtctccaggagctggaacgagacaagaaccttatgttagcgactcttcagcaggaaggcctgttgagccgttataagcagcagcggttactaactgtgctgcctagcctactggataagaaaaagagcgtagtgagcagcccccggccgccagagtgcagcgcctccgccccagtggcagccgccgtgcccaccagggaaagcatcaagggctctttgtcagttctgctggatgacttgcaggacctgtccgaagccatatccaaggaggaagcagtatgtcagggggacaacctggacagatgtagctccagcaatccccagatgtctagctag

SEQ ID NO: 345096 - DNA, 2349 bp, Artificial Sequence
  derived and/or modified sequence
atgttcccccccagcggcagcaccggcctgatcccccccagccactttcaggcccgccccctgtcaactctgcccaggatggcaccaacatggctttcggatataccactggtccagccccctgggcaccaggacgtgtcggagaggcggctggatactcagcggcctcaagtgaccatgtgggagcgcgacgtaagctccgacaggcaagaaccgggcaggcgggggaggagctggggcctcgaaggatcccaggccctgtctcagcaagccgaagtaatcgtccgacaacttcaagagctcaggcgattggaggaagaggtgaggctgcttcgggaaaccagcttacagcaaaaaatgaggctggaagcacaggcaatggagctggaagcattggcgagggctgaaaaggcaggtcgggccgaggccgaggggctgagggccgcattagcaggggccgaggtggtcaggaagaacctcgaagaaggccggcagagagaactggaagaagtccaaaggctccaccaggaacagctttcaagtctgacccaggctcacgaagaggctcttagttctttgacatccaaagccgagggtctggaaaagtcattgagttccctggagacgcggagagctggagaagctaaagaactagccgaggcccagagggaggcggaactattacggaaacagctatccaaaacacaagaagatctcgaggcccaggtgacgctcgtcgagaacttgaggaaatacgtgggcgaacaggtgccttctgaagtgcattctcaaacctgggagctcgagcgccagaaactcctggacactatgcagcacctccaggaagaccgagactcccttcatgccaccgcagaattactgcaggtccgcgtccagtctctgactcacattcttgcgcttcaggaagaagaattgaccagaaaagtgcagccctcggactcgctggagccagagtttacccgcaaatgtcagtcactcctaaaccgttggagggagaaagtattcgccctgatggtccaactgaaggcacaagaactcgagcacagcgattccgtcaagcagcttaagggccaggtcgccagcttgcaggaaaaagttactagtcaatcccaagaacaggctattctacaacgcagcctgcaagacaaagccgctgaggtcgaagtcgagagaatgggcgctaaagggcttcaactcgagttgtcccgagcccaagaagctaggcggaggtggcagcagcaaaccgcatccgccgaggaacagctaagactggtagtgaatgctgtgtctagctctcagatttggctagagacaactatggcaaaagttgagggggctgcggcccaactgcctagcctgaacaaccgactaagctacgctgtccggaaagtacacactatacgggggctgatagctagaaagctggccctggcccaattaaggcaggaatcttgcccactccccccccccgtgaccgacgtgtctctcgagttacagcaattgcgggaagagcgaaatcgcttggatgcagagttgcagctgtccgcccggctgattcaacaggaggttggaagggctcgcgagcaaggagaagctgagcgccagcagctgtcaaaagtggcacaacagttggaacaggagctccagcagactcaggagtcattagctagtttggggttgcagttggaagtggccagacaaggccagcaggaatcaaccgaagaagcagcctctctaagacaggaactgacccaacaacaggagctctacggccaggccctgcaggagaaagtggctgaggtggaaacccgccttcgggagcagttgagcgacacagagagacgtctgaacgaagcaagaagagaacacgccaaagccgtggtgtctcttcgccaaattcagcgcagggctgcgcaagagaaagagaggtcgcaggaactaagacggttgcaggaagaggctcgcaaagaggagggacaacgactggcacgtcgccttcaggaactggagcgcgataagaacctgatgctagctactttgcagcaagagggactactgagtcggtataagcaacagcggctgctcaccgtgctgccgtccctattggacaagaaaaagagcgtggtgtcgtcccccaggccacctgagtgcagtgccagtgcacccgtggctgctgctgtgccgactagagaaagtatcaaaggctccttgagtgtgctgctcgatgacctacaggatctctctgaagcaatctccaaggaagaggccgtttgccaaggagataacttagaccgatgcagcagttcaaaccctcagatgagctcgtag

SEQ ID NO: 345097 - DNA, 2349 bp, Artificial Sequence
  derived and/or modified sequence
atgttcccccccagcggcagcaccggcctgatcccccccagccacttccaggcaagacccctaagtactctgcccaggatggctcccacctggctgtcggatatacccctagttcagccgcctgggcaccaagatgtatccgaacgccgactcgacactcaaaggcctcaagtgacaatgtgggagcgtgacgtctcatcagaccggcaggagcccgggaggcgcggcaggtcctggggactggaagggtcacaggctctgtctcagcaggctgaggtgatagtgcggcagctccaggagcttagacggcttgaggaagaagtccgactgctcagggagacctcactgcagcagaagatgagacttgaggctcaggccatggagctggaagccttggcaagagctgagaaggctgggcgagcagaggctgagggcctgagagccgccttggccggggccgaagtggtgcgcaagaacctggaggaaggtcgacagcgagaacttgaggaagtccagaggctgcatcaagagcagctgagttcgctcacccaggctcatgaggaggctctttcatcccttactagtaaagctgagggacttgagaaatcacttagctcactggagacacgccgcgcaggcgaggcgaaggagctggcggaagcccagcgggaagccgaactactacgtaagcaattgtccaaaacgcaggaagacctggaagcccaggtaaccctggttgagaatttacgcaaatacgtcggcgaacaggtcccctccgaggtgcactcccaaacctgggagctggaaagacagaagctgttggacactatgcaacatcttcaggaggaccgggattctctgcacgcaaccgctgaactgttacaggtacgcgtgcagagcctaacacatatcctcgccttgcaagaagaggagctgactcgcaaggttcagccttcagactcattagagcctgagtttacaaggaaatgccagtccctgctgaaccggtggcgagagaaggtgtttgctctgatggttcaactaaaagctcaagaacttgagcacagcgactccgtgaagcagctcaaggggcaggtagctagcttgcaggagaaggtcacttcccagtcacaagagcaagccatcctgcagcgatctctccaggataaagctgcagaggtggaagtagagcggatgggggccaagggactccagcttgaactgagccgagcccaggaggcacggaggcgatggcaacaacagaccgctagcgctgaggagcagctccgccttgtggtgaatgctgtaagttcatcccagatttggttggagaccactatggccaaggtggagggcgctgccgcacagctgccctccctcaataaccgtctgagctacgcagtgcgcaaggtgcatacgatacggggcctcatcgccagaaagttggcactggctcagttgagacaagaatcttgccctctgccacctccagtcaccgatgtatccttggagctgcagcagttgcgcgaggagcggaacagactggacgccgaattgcagctgagcgcgaggctgattcagcaggaagttggtagggccagagagcagggcgaagcggagcgccaacaattgagcaaagtcgcacaacagcttgagcaggaactgcaacagacccaggaaagcctggcaagcctgggacttcagttggaagtggcgcgccagggccagcaagagtccaccgaggaggctgcttctctccgccaggagttaacacagcagcaggaactgtacggccaggccttacaggagaaagtggcagaggtggagacgcgattgagagaacagctgtcggatacagagaggagacttaacgaagcaagacgcgagcacgccaaggctgtggtgtcactccgtcagattcagaggagggccgcccaggagaaggagcggtcccaggaactcagaagattgcaggaagaggcccgtaaagaggaaggacagcgtctcgcacgacgtcttcaggaacttgagagagacaaaaatctgatgctcgccactctccagcaggaaggcttgctttcacgatataaacagcagcgtctactgacagtactgcctagcctattagataagaagaagtccgtagtgagcagtcctcgtcccccggaatgtagcgcaagtgcccccgtagctgccgccgtgccaaccagagaatctatcaaaggctctctgagcgtgttactggatgacttacaggatctgtctgaagccattagcaaagaggaggccgtctgccagggggacaatcttgaccggtgttcctccagcaacccacagatgagtagttag

SEQ ID NO: 345098 - DNA, 2190 bp, Artificial Sequence
  derived and/or modified sequence
atgttcccccccagcggcagcaccggcctgatcccccccagccactttcaggcccgccccctgagtaccttgccccgtatggcgcccacttggctgagtgatatccccctcgtgcagcctcccggccaccaggatgtgtccgaacgccgccttgatacccagcgccctcaggtaacaatgtgggagcgagacgtgagcagtgatagacaggaacctggaagacgaggaagatcatgggggttggagggatctcaggctctttcacaacaggccgaagtcatagtgcgccagctgcaagaactgcgccgactggaggaggaggtgagactgttgcgcgagacctcattgcagcagaagatgcgcctcgaggcacaagcaatggagctagaagcgctggctagggctgaaaaagccggacgtgctgaagcggaggggctgagagccgcgttagctggggcagaggtggtgcgaaaaaacctggaagaagggagacaaagggagcttgaagaggtgcaaagattacatcaagagcagctcagttccctcacccaggcccatgaagaagctctgtcctcactaacgtccaaagccgagggactggagaaaagtctgtcttcactggaaacccgccgggcaggagaagcgaaggaacttgcagaggcacagcgcgaggcagaactgctgcgtaagcagctgagcaaaacccaggaggaccttgaggctcaagtaactctggtggagaatttgcggaaatacgtcggcgagcaagtgccctctgaagttcactcccaaacctgggagctggagcgccaaaagctgctcgatactatgcaacatcttcaggaggatagggatagtcttcacgccaccgcagagttgctgcaagtgagggtccagagcctcacacacatattagcactgcaagaagaagaattaaccaggaaggtgcaaccctcagatagtctggagccagagttcacccggaagtgccagtcccttctgaaccgatggcgtgaaaaggttttcgctctgatggtgcaacttaaagcacaggaacttgaacactcagattccgttaagcaattgaagggccaggtggcttccctgcaagaaaaagtgacgtcacaatcccaagaacaagccattctccagcgaagcctccaggataaagctgccgaggtagaggtggagcggatgggcgcgaaaggactgcagctcgagctatcgagggctcaggaagccagacgcaggtggcagcagcaaacagcgtccgctgaagagcagctccgtctcgtggtgaatgctgtaagtagctgtcctctacccccacctgtcaccgacgtgtccctcgaattgcagcagttacgcgaggaaaggaatagactggacgccgaattgcagctgtccgcccggctgatccaacaggaggtaggccgtgctcgggagcagggcgaggctgagagacaacaactctcaaaggtggctcaacagctggagcaggagctccagcagacccaggagagtctcgcctccctaggcctccaactcgaggtcgccagacaggggcaacaggagagcaccgaggaagcagcaagcttgcgtcaggagctaacacagcagcaggagttatacggtcaggcactgcaagagaaggttgcggaagttgagactaggctcagagaacagctcagtgatactgaaaggcgccttaacgaggctcgcagagaacacgccaaagcggtggtgtctctgcgccaaatccagcgccgcgctgcacaagaaaaagaaagaagccaggagctccgtcgacttcaggaagaggctcgcaaggaggaggggcagcgcctggcacggcgcctgcaggagcttgagcgcgataaaaacctgatgctggccactctccagcaagaaggtttattgtcccggtacaagcagcaacgcttgttgacagttctgcccagcctgctggataagaaaaagagcgtagtgtcttccccaaggcccccggagtgtagcgcaagcgccccagtggctgccgccgtgccaactagggagagtataaaggggtcattgagcgtgctgttggacgacttgcaggatctgtcggaggccatttcaaaagaagaggccgtatgccaaggagacaacctcgaccgatgtagtagcagcaacccgcaaatgtcgtcctag

SEQ ID NO: 345099 - DNA, 2349 bp, Artificial Sequence
  derived and/or modified sequence
atgttcccacccagtggtagtactggactgatacccccttcacacttccaggctcggcctctgtcaacactccctaggatggcacccacctggctctctgacattcccttggtacagccaccaggacaccaggacgtgtccgaaaggcgtctcgacactcagagacctcaagtgacaatgtgggagcgtgacgtttcatcagacagacaggagcccggtaggaggggacgctcctggggtttagaaggctcccaagccctgtcgcaacaggccgaggtgatcgtgcggcagctgcaggaactaaggagactggaggaagaggtgaggctgttgcgcgagaccagccttcagcagaaaatgcgactggaggcacaggccatggagttggaggctctggccagggctgaaaaagccggtagggcagaggcggaaggattgcgcgcagccctcgctggggcagaagtcgtaaggaaaaacctcgaggaaggtaggcaaagagaattagaggaagtccagcgtctgcaccaggaacagctgtcatctctgacccaagcccacgaggaagcgttgagctccctgacctccaaagccgaaggtctggagaagagcttgagcagcctcgagacacggagggccggagaggcaaaagagcttgccgaagcacaacgggaagccgagttgcttaggaagcagctgtctaagacacaagaggatttggaagcccaggtcaccctcgtagaaaaccttagaaagtatgtcggggaacaggttccctctgaggtccactcgcagacatgggagctggagaggcagaaattactagatactatgcagcacctgcaggaagacagggactcattgcatgctactgctgagctgttgcaagtgagagtccagtcccttactcatatacttgcattacaggaggaggagctgacgagaaaggttcaacccagtgactctcttgaaccggagtttaccaggaagtgtcagtccctcctcaatcgctggcgagagaaggtcttcgccctgatggtgcagctaaaggcacaggaactggagcacagcgactcagtcaagcagttaaaaggccaagtcgcaagccttcaggaaaaggtcacttctcagtcacaggagcaagccatcctccagcgatctttacaggacaaggctgctgaagtggaggttgagcggatgggggctaagggcctccaactggagctgagcagggcccaagaagcccgacgcagatggcagcagcaaaccgcatccgcagaggaacagctgcgtcttgtggttaacgctgtttcttccagccagatctggctagaaaccaccatggcgaaggtagaaggtgcagcagcacagctgcctagcttgaacaatcggttgtcttacgccgtccgcaaggtccacaccatccggggtctcatcgccagaaagctggccctggcccaacttagacaggaatcctgtccactgccgccaccagtgaccgatgtcagtctagagctccagcagctgcgcgaggaaaggaatagattagatgctgagctgcagttgtcagctaggctgattcagcaggaggtgggtagagcccgtgaacagggtgaggctgagcggcagcagctcagtaaggtggcccagcagctggagcaagaactccagcagacccaagaaagcctcgccagcctcgggctccagctggaggtggcacgccaaggacaacaggagtctacagaggaagccgcatcccttagacaggaacttacacagcagcaggagctctatgggcaagcactccaggaaaaggttgctgaggtcgaaacacgactgagagagcaactgtctgacacggagcggcgtctgaacgaagccaggcgcgaacacgcaaaggcagtcgtcagcctgagacagatccaacgcagagctgcccaggaaaaggagcggagccaggagctccggcgattgcaagaggaggcccgtaaggaagaaggccagcgacttgctcgcagacttcaggaactcgagagagacaaaaatctcatgctagccactctgcagcaggaaggcctgctgtcacggtacaaacaacagcgcctgctgactgtccttccttctcttcttgacaagaagaagtccgtggtgtcatcacccagaccacccgaatgttccgccagtgccccagtagcggctgcagtgcccactcgggaatccatcaagggcagcctgagcgtcctcctagacgacctgcaggatctgagcgaagctatttctaaggaggaggccgtttgccagggggataatctagatcgttgcagctccagtaacccccaaatgagcagttag

SEQ ID NO: 345100 - DNA, 2349 bp, Artificial Sequence
  derived and/or modified sequence
atgttccctccaagtgggtctaccggcctgatacctcccagccattttcaagccagacccctgtccacgctcccgcgaatggccccaacttggctgagtgatattccattggtgcagccacccggacatcaggacgtttctgaaaggcggttggatactcaaaggccacaggtgacaatgtgggaaagggacgtaagctccgatcgacaggagccgggtaggaggggtcgaagctggggcctcgaaggatcccaggctctgtcacagcaggctgaagttattgtgaggcagttacaggagctgagaagactggaggaagaagttcggcttttgagggagaccagcttgcagcagaagatgcgactcgaagcgcaggcaatggaactggaggcactagccagggccgaaaaggcagggcgtgcagaagctgaaggcctccgcgcagcgctcgctggcgcagaggtggtcaggaagaatcttgaagagggtcggcagcgtgaacttgaagaagtgcaacgtctccaccaagagcaactctcttccttaacacaggcccatgaggaggctctgtccagtctcacatccaaagccgaggggttagaaaagtccctcagcagtctggagacccgacgggctggggaggcaaaagaacttgccgaagcccagcgggaggcagagctgcttaggaagcaactgtctaagacacaggaagatttggaggcacaggtgactctcgtggaaaatctccgcaaatacgtcggtgaacaggtgccctccgaggtccatagccagacatgggagctcgaacggcagaagcttctggataccatgcaacaccttcaggaagatagagactccctgcacgcaacagccgaactgctccaggtcagagtgcagtcactgactcacatcctggctctacaagaggaggagctgactcgtaaggtgcaaccctctgattccctggaacctgagtttacaagaaagtgtcagtcattgctgaatcggtggcgggaaaaagtgttcgctttgatggtgcagttgaaggcccaggagctggagcattcagacagcgttaagcagctgaagggccaggtggcaagcctacaggagaaagtgacatcccagagccaagaacaggcaatcctgcagcggtccttacaggacaaggcggctgaggttgaggtggagaggatgggcgctaagggactgcaattggagctgagccgcgcacaggaggcaagacgccgttggcagcaacagactgcatcagccgaagaacaattgaggctcgttgtgaatgccgtgtcaagctcccaaatttggctggaaactaccatggcgaaggtggaaggagctgctgctcagctaccgagcctcaacaatcgcctgagctacgccgtcagaaaggttcatacaatcagggggctgattgccaggaagctagccctggcacagctgagacaggagagctgcccactgccaccacctgttacggacgtctctttagaattgcaacagctcagagaggagcggaatcggctggatgcagagctgcagttgagcgctcgcctcatccagcaggaagttgggcgagcacgggaacaaggggaagcagagcgtcagcagctatccaaggtcgcccaacaactagagcaggagctgcagcaaacccaggaaagcctcgctagcctgggactgcagttagaagtggcgagacaagggcagcaggagtcaacggaggaagccgcatcacttagacaggagctgacacagcagcaggaattgtacgggcaggccctccaagaaaaagtggctgaagtggagacgcggttacgtgaacagctttcagacaccgagcggcgtttaaatgaggctcggagagagcatgcaaaagccgttgtgtccctgcgacagattcaacgtcgagccgcacaggagaaggagcgtagccaggaactgcgcaggcttcaagaggaagctagaaaggaggaaggccaacgcttagccaggcgcttgcaggaactggagagagataagaaccttatgctggccacgctccagcaagaggggcttttgtcacgctacaagcagcagaggctactgaccgtgctgcctagtctgctcgataagaagaaatctgtggtcagctccccacggccacccgagtgttccgcatccgcccctgtggcagcggcagttcccaccagggagtctatcaaaggtagcctgtcagtgctgctggatgatctccaggatctgagcgaagccatcagcaaagaggaggctgtgtgccagggcgataatcttgatcgttgtagctcttcgaaccctcagatgtcctcatag

SEQ ID NO: 345101 - DNA, 2190 bp, Artificial Sequence
  derived and/or modified sequence
atgtttccaccgtccggtagtactggactgatcccaccatctcacttccaggccagacccctcagcactctcccaagaatggcaccaacctggctaagcgatattcccctggtgcaaccaccaggccaccaggacgtgtctgagcggagattggacacgcagcgtcctcaagttacgatgtgggagagggatgtgagctcggatagacaggaacccggtaggcgcggtcgctcttggggactagagggatcacaggccctgtcccagcaggctgaggtgattgtgcgacaactgcaggaactcagaaggctcgaagaggaggtaagattactgcgtgagacaagtctgcagcagaagatgcgactggaagctcaggccatggagttagaggccttggctcgagccgagaaggctgggagggctgaggcagaaggactgcgcgcagcattagctggtgcggaggtggtacgcaagaatttggaagagggacgacaacgcgagcttgaggaggtgcagcgattacaccaagaacagctgagcagcctgacacaggcccatgaggaggccctatcgtcactaactagtaaggccgaggggctggaaaaatccctctcctcattagagacacggagggctggagaagccaaggagctcgccgaggctcagcgagaggctgagctgctgcggaagcagctctctaagacgcaagaagatctggaagctcaggtcacccttgtggaaaatctccggaaatacgtgggggagcaggtcccttctgaagtccacagccagacatgggagttggaacgacagaagttactcgataccatgcagcaccttcaggaggaccgtgactccctacacgccactgcagaactgctgcaagttagggtccagagcctcacacatattctcgcattgcaggaggaggagctcacccggaaggtgcagccttcggactccttagaacctgaatttacccgcaaatgccagtcactcctgaatcgatggcgagaaaaagtgttcgctttaatggtgcagctgaaggcccaggaactcgaacactcagatagtgtgaaacagcttaaggggcaggtggcatcactgcaggaaaaagtgacctcgcagtcccaagagcaagcaattctgcagcgctccctgcaagataaagccgcagaagttgaggtggaaaggatgggggcaaaaggcttacagctggaactctcaagggcccaggaagcacggaggaggtggcagcagcaaaccgcatccgcagaagagcagttgcgcttggtcgtgaacgccgtctcctcctgcccattgcctccaccggtgaccgatgtgtcgctcgagctccagcagttgagggaggagagaaataggttagacgctgaactgcagctttctgctagactaatccagcaggaagtgggtcgcgcacgagagcagggcgaggctgaacgccagcagctgagtaaggtagctcagcaattggaacaggaactgcagcagactcaagaatcattggcctccctcggtttacagttagaagtcgctagacagggccagcaggagtcaacagaggaggcagctagtttgcgacaggagctcacacaacagcaggaactttacggacaagcactgcaggaaaaggtggccgaggttgaaacaaggctcagagagcaactatcagatactgaacggagactcaatgaggcccgacgggaacatgctaaagccgtagtgtcgctgaggcagatacagcggcgtgctgctcaggagaaagaaagatcacaggaactgcgtcggctccaggaagaagcgaggaaggaggaaggacagcggctggccagaaggttgcaggaattggagagagacaagaatctcatgcttgctaccctacaacaagagggtcttctgagtcgctataagcagcagcgcctgctgaccgtcttaccctctttattggacaaaaagaagtccgtggtttctagcccaaggccgccagagtgcagtgcttcggctccagtcgcagccgcagtgccgactcgtgagtcaattaaagggtccctaagcgtactgctggatgacctgcaagacctaagcgaggcaatatctaaagaggaagcagtgtgccagggtgataacctggatcgttgtagcagtagtaaccctcaaatgagctcctag

SEQ ID NO: 345102 - DNA, 2349 bp, Artificial Sequence
  derived and/or modified sequence
atgtttcccccatcagggagtaccgggctcatcccgccatcccactttcaggctaggcctttgtccaccctcccacgtatggcacctacctggctgagcgatattccgctcgtccagcctccagggcaccaagacgtgagtgagagacgccttgacactcagaggcctcaggtaacaatgtgggaaagagacgtgtcttcagacagacaggagcctggacgtaggggcaggagctggggcttggagggctctcaggccctctcccagcaggccgaggtgatagtgaggcagttgcaggagctgcgcaggttagaagaagaggtgagactgcttcgtgaaacatccctgcagcagaaaatgagacttgaagcccaagctatggagttagaggccctggctcgagccgaaaaagctggccgtgctgaggccgagggcctgagagccgctcttgcaggtgcagaggtggtgcggaaaaacctggaggaagggagacagcgggaacttgaggaagtccagaggcttcaccaggaacagttgagttctctaactcaggcacacgaggaggcactttccagtctgacttccaaagcagagggcctggaaaagtctttatcctccctcgaaacgcgacgagcgggtgaagccaaagaactggctgaggcccagagagaggcggagctgttacgaaaacagctgagcaaaacacaggaggacttggaggcgcaggttaccttggtcgaaaacctaaggaagtacgtaggtgagcaggtgccctcagaggtgcactctcagacctgggaactggagagacaaaaactgctggacacaatgcagcacctgcaagaagaccgggactcactgcacgcaaccgcagagctgctacaggtcagagtacagtccctgactcacatcctggcactccaagaggaggagttaacccgcaaggtacagccgtccgatagcctggagccggagttcaccagaaagtgtcagagcctgctcaaccgctggcgggagaaggttttcgccctgatggtgcagttgaaggcccaggagttagaacattctgactcagtgaaacagctcaaggggcaggttgcctcactgcaggaaaaggtgacatcacaatcccaagagcaagctattctgcaacgatccctccaggataaagcagcggaggtcgaggtggagaggatgggggctaaagggcttcaattagagctgagtagggctcaggaggccagaagacggtggcagcagcagacagcctcggccgaggagcagctgcgactggttgtgaatgcagtgagtagctcccagatttggttggaaactaccatggccaaggtggaaggcgcagcagcacagctgcctagtctgaacaacaggctttcatatgccgttaggaaggttcacacaatccggggtcttatcgcccgaaaactcgccctcgctcaactccgccaggaatcttgccccttgccaccaccggtaaccgacgtgtctctcgagctgcagcaattgcgcgaagaacgcaacagactggacgcggaactccagctctccgccaggctgattcagcaggaagtgggtagggcacgtgagcagggagaggcggaaagacagcaactgtcaaaagtagcccaacagttagaacaggaactccagcagacacaggagagtctagctagcctcgggttgcagttggaagtcgcaagacagggccagcaggagagcaccgaggaagccgcttctctccggcaggagctgacccagcaacaggagctgtacggacaggcgctccaggagaaggtagccgaagttgagacgcgacttcgcgaacagttgagcgatacggagaggcgactgaatgaggcgaggagagaacacgccaaggccgttgttagtcttaggcaaatccaacgccgagccgctcaggagaaggaaaggagccaggagctaaggaggctgcaggaggaggccagaaaagaagagggccagagacttgcacgcagactccaagaattggagagagataagaatctgatgctcgcaacactgcagcaggagggactcctctctcggtataagcagcagcgactgcttaccgtgttgccatctctactcgataagaaaaagtccgtggtgtcatcccctcggccaccagaatgctccgctagcgccccagtcgctgctgcagttccaacccgagagtccattaagggatccctgagcgtgctgctggacgaccttcaagacctgtctgaagccatctccaaagaagaggctgtctgccagggtgataacctcgatagatgttcctccagcaatccacaaatgtccagttag

SEQ ID NO: 345103 - DNA, 2349 bp, Artificial Sequence
  derived and/or modified sequence
atgttccctccgtcaggttcgactggactgataccaccttcccattttcaggccaggccgcttagcaccctgccacggatggcacccacttggttatctgatattccgctggtccaacctcccggacatcaagatgtatctgagaggaggttagatactcagcggcctcaggttaccatgtgggaaagggacgtgagttcagaccgccaagaacccggtaggcggggtcgtagctggggcctggagggctctcaggcactgtcgcaacaggctgaggtaatcgtaaggcaactccaggaactcagacgcctcgaggaggaggtgcgcttgctgagagagactagtcttcaacagaaaatgcgcttggaggctcaggcaatggaactggaggcattggcgagagctgagaaggccggtcgtgccgaagcagaaggtctacgcgcagcactcgctggagccgaagtggtccgaaaaaacctggaagagggccgacagcgcgaactggaagaagtgcagaggcttcaccaggaacagctatctagcctgacccaggcccacgaggaagctctatcatctttgacttcgaaggctgaggggcttgaaaagtcattgagcagccttgagacgagaagagccggagaggcaaaagaattagcggaggcgcaacgcgaggcagaactgctacggaagcagttgagcaagacacaggaagacctggaggctcaggtaacgctggtcgaaaacctcagaaagtacgtcggtgagcaggtaccatctgaagtgcattcccagacttgggagctggagcgccagaaacttctggatacaatgcagcacctgcaggaggacagagatagtcttcatgcaacagccgagctgctgcaagtcagagttcagtcccttacacacattttagctctgcaggaagaggaacttacaagaaaagttcagccatcagattcactggagccagaattcacccgtaagtgccagtcactcttaaaccgttggcgagagaaggtcttcgcccttatggtgcagctgaaagcacaggaactcgaacactccgactcagtcaagcaactaaagggacaggtcgcgtccctgcaggaaaaggtgacatctcagtctcaagagcaggccatactgcagaggagtctgcaggataaggcagcggaggtggaagtggagcgaatgggagctaaaggcctgcagctcgaactgtctcgggctcaggaagcacgccgacgatggcagcagcagactgcctcagcagaggagcagcttcgccttgttgtgaacgccgtaagctcttctcagatttggcttgaaactacaatggccaaggtggaaggagctgccgcacagcttcccagcttgaataacaggctgagctatgctgtgaggaaggttcatactattcgcggtctgatcgccagaaagcttgcgctggcacagctgaggcaagagagttgcccacttccgcctcctgttactgacgtttctctggagctccagcaactacgggaggagcgcaacagactggacgccgagctccagctgtctgcacggcttatacagcaggaagtgggcagggctcgagagcagggcgaggcagaaaggcagcagttgagtaaagttgcccagcagctcgaacaagaactacagcagacacaggagtctctggccagcctgggactccagctggaggttgcacgccaggggcaacaggagtccactgaggaggcggcatctctgcggcaggagctcacccaacagcaggagttatatgggcaggccttgcaggagaaggtggccgaagtcgagacccggctgagagaacaactgtccgacactgaacgcaggctcaatgaggccagaagggagcatgcaaaggcagtagtgtccctcaggcagatacagcgccgagccgctcaagagaaagaacgtagtcaggagttacggaggctgcaggaggaagcacgcaaggaggagggccagcgtctcgcacgaagactccaggagctggagagagataaaaatctcatgctcgccacactgcagcaggaaggattgttgtccagatacaagcagcaacgccttctgacggtgcttcctagcctgctggacaaaaaaaaatccgtggtgagctctccacgcccacccgaatgctcagcctccgcacctgtggcagctgccgtccctacacgcgagtccattaaaggatccctgagcgtgcttctcgatgacctccaggatctttcagaggccatctcgaaagaggaggccgtgtgccagggggacaacctcgacagatgcagttctagcaatccgcagatgagcagttag

SEQ ID NO: 345104 - DNA, 2190 bp, Artificial Sequence
  derived and/or modified sequence
atgttccctcctagtggaagcactggattgatcccccctagccacttccaggctaggccactcagtaccctcccacggatggccccaacttggctctcggacattccactggtccagccgccaggacatcaggacgtctcggagaggcgtctcgatacgcagcgccctcaggtcactatgtgggaacgcgatgtcagcagtgaccgacaagagcccggacgacggggacggtcctgggggctggaggggtcccaggcactctcccagcaggcagaagtgatagttaggcagctccaggaactccgacgtctcgaagaagaagttcgcttacttagggagacaagtctgcagcagaagatgcgactggaggctcaggccatggagctggaggcccttgctagggctgagaaagccggtagggccgaagctgaggggctcagagctgctttggcaggggcagaagtcgtgcgcaagaacctcgaagagggtagacagcgtgaattagaggaagtgcaacgcttacatcaggagcagctgtcaagtcttactcaggcacacgaggaggccctgtcttctctgactagtaaggctgagggcttagagaagagcctctctagcctcgaaactaggcgggctggagaggcaaaagagctcgcagaagcacaaagagaagcagagctattgcgcaagcaattatctaagacacaggaagatctcgaggctcaagtgacattggtggagaacctgagaaagtacgtgggagaacaggtccctagtgaggtccacagccagacgtgggagctggagcgtcagaagttactcgacaccatgcagcatttgcaggaagacagagactccctgcacgcaacagcagaacttctccaagtgcgggttcagagtttaacacatattctagctctgcaggaggaggagctgacccgaaaggtgcaaccctccgattcactagagcccgaatttacgaggaaatgccagtctctactgaatagatggcgcgagaaggtctttgctttgatggtgcagctcaaggcccaggaacttgaacactcggattcagtgaaacagctgaagggccaagttgcttcactgcaggagaaggttacctctcagtcacaggagcaagccattttacagaggtccctgcaggataaagcagcggaggtcgaggtggaacggatgggcgctaaaggcctgcagctggaacttagtcgcgcacaggaggccaggcgacggtggcaacaacaaacagcgtctgctgaagaacagctacggttagtcgttaatgctgtgtcctcctgccccctgcctccacctgtgacggatgtgagcctggagctgcagcaactgcgggaggagagaaacagactggacgccgaacttcaactttcagcaaggctaatccagcaggaagtcgggagggcaagagagcagggggaggcagagagacagcagctgagcaaggtggctcagcagctggagcaggagctccaacagacgcaagagtctctagcaagcctgggtttgcagcttgaggtggccagacagggtcagcaggaatctaccgaagaggctgcctctttgaggcaggaactcactcagcagcaagaactatatggacaggccttacaggaaaaagtggcggaagtagaaaccagactgagagagcagctatctgataccgagaggagacttaacgaagctcggagggaacacgccaaggccgttgtctccctgcgtcagattcagcgcagagctgcccaggagaaggaacgcagccaagagcttagacgtctgcaggaagaggcccgaaaggaagagggccagcgcctggcaaggagactgcaggaactggaaagagataaaaaccttatgctggccactcttcaacaggaggggctgctgtctcgctacaagcaacaaagactcttgacagttctgcctagtctgctagataaaaagaaatcagtagtctcctccccacgtccaccagagtgttccgcatcagcaccggtggcagccgctgtgcctacccgggagagtatcaaaggcagtctgagcgtgctgctggatgatctgcaggacttgtccgaagccattagtaaggaagaggctgtgtgtcaaggcgataatctagatcgctgcagttcttcgaacccacaaatgagctcttag

SEQ ID NO: 345105 - protein, 316 aa, Artificial Sequence
  derived and/or modified sequence
MFPPSGHQDVSERRLDTQRPQVTMWERDVSSDRQEPGRRGRSWGLEGSQALSQQAEVIVRQLQELRRLEEEVRLLRETSLQQKMRLEAQAMELEALARAEKAGRAEAEGLRAALAGAEVVRKNLEEGRQRELEEVQRLHQEQLSSLTQAHEEALSSLTSKAEGLEKSLSSLETRRAGEAKELAEAQREAELLRKQLSKTQEDLEAQVTLVENLRKYVGEQVPSEVHSQTWELERQKLLDTMQHLQEDRDSLHATAELLQVRVQSLTHILALQEEELTRKVQPSDSLEPEFTRKCQSLLNRWREKVFALMVQLKAQE

SEQ ID NO: 345106 - DNA, 951 bp, Artificial Sequence
  derived and/or modified sequence
atgttcccccccagcggccaccaggacgtgagcgagagaagactggacacccagagaccccaggtgaccatgtgggagagagacgtgagcagcgacagacaggagcccggcagaagaggcagaagctggggcctggagggcagccaggccctgagccagcaggccgaggtgatcgtgagacagctgcaggagctgagaagactggaggaggaggtgagactgctgagagagaccagcctgcagcagaagatgagactggaggcccaggccatggagctggaggccctggccagagccgagaaggccggcagagccgaggccgagggcctgagagccgccctggccggcgccgaggtggtgagaaagaacctggaggagggcagacagagagagctggaggaggtgcagagactgcaccaggagcagctgagcagcctgacccaggcccacgaggaggccctgagcagcctgaccagcaaggccgagggcctggagaagagcctgagcagcctggagaccagaagagccggcgaggccaaggagctggccgaggcccagagagaggccgagctgctgagaaagcagctgagcaagacccaggaggacctggaggcccaggtgaccctggtggagaacctgagaaagtacgtgggcgagcaggtgcccagcgaggtgcacagccagacctgggagctggagagacagaagctgctggacaccatgcagcacctgcaggaggacagagacagcctgcacgccaccgccgagctgctgcaggtgagagtgcagagcctgacccacatcctggccctgcaggaggaggagctgaccagaaaggtgcagcccagcgacagcctggagcccgagttcaccagaaagtgccagagcctgctgaacagatggagagagaaggtgttcgccctgatggtgcagctgaaggcccaggagtag

SEQ ID NO: 345107 - DNA, 951 bp, Artificial Sequence
  derived and/or modified sequence
atgtttcccccttccggccaccaggatgtgagtgagaggcgactggacactcaacggccccaggtcactatgtgggaacgggatgtgagcagcgatcggcaggagcctggccgtcggggtagaagttgggggttagaaggctcgcaggccctgagtcagcaggcagaggttatcgttcgtcagctgcaggaacttcggagattggaggaggaggttagactgcttcgagagacctccttacaacaaaaaatgcggctagaggcccaggccatggagctagaagcactcgcacgcgccgaaaaagccggtcgggccgaggccgaaggcctccgggccgccctagcaggtgctgaggtggtgaggaaaaatctggaggaagggcgtcagagggaactggaggaagtccagaggcttcatcaggagcagttatctagcctgacacaggcccatgaggaagccttgtcaagcctgacctctaaggcagaaggcctggagaaatccctatcctctctggagacccgacgagccggggaggcaaaagagctggctgaggctcagagggaggccgaactgctgcggaagcagcttagcaaaacccaggaggacttggaagctcaggtgaccctcgtggaaaatttgcggaaatatgtaggcgagcaggtgccctccgaggtgcacagccagacctgggagctggagcggcagaagctcctcgacaccatgcaacatttgcaggaagatcgtgattccctgcacgcaacggcagagctcctgcaggtgagggtgcaaagccttacccatattctggcactgcaggaggaggagctgacccgcaaggtgcaaccctctgacagcttggaacccgagtttactagaaaatgtcagagtttacttaatcgatggcgcgaaaaagtattcgccctaatggtgcaacttaaggcgcaggaatag

SEQ ID NO: 345108 - DNA, 951 bp, Artificial Sequence
  derived and/or modified sequence
atgttccccccctctggacatcaagacgtatcagagaggcgcctagacacccaacgaccgcaggtcacaatgtgggaacgggacgtctctagcgaccgccaggagcccgggcgccgcggccggtcctggggacttgaaggtagccaagcgttaagtcagcaggccgaggtgatcgtgagacagctgcaggagctcaggagacttgaggaagaggtgcgcctgcttcgtgagactagcctgcagcaaaagatgcggctcgaagctcaggcaatggagctggaagctcttgccagggccgaaaaggctgggcgggctgaagccgaaggtctgcgagccgctctggccggagcagaggtcgtgcggaaaaatttagaagaaggaaggcagagagaactggaagaagtccaaagactccaccaggaacagctgagcagcctaacccaggcccacgaggaagctctgtcatccctcacgagtaaggcagaaggtctggagaaatctttatctagcttggaaactagacgtgcaggagaagcaaaagagctggctgaagctcagagggaggccgagcttctgcgtaaacagttatctaagacccaggaagatctcgaagcgcaggtcacgctggtggaaaacctgcgcaagtatgtcggagagcaagttcccagcgaggtgcattcacagacctgggaattggagagacagaaactcctcgacactatgcaacacctgcaggaggatcgagacagtctgcacgccaccgctgaactgttgcaggtacgggtccagagcttgacacatatactggccctgcaggaagaagagttaactaggaaagtgcagcccagtgactcactggagccagaatttacgcgaaagtgccagtccctcctcaaccggtggcgagagaaagtgtttgccttgatggtgcagctgaaagcccaggagtag

SEQ ID NO: 345109 - DNA, 951 bp, Artificial Sequence
  derived and/or modified sequence
atgtttcctccttctggccaccaggatgtgtctgaaagaaggctggacacccagaggccccaggtgaccatgtgggagagagatgtgtccagtgaccggcaggagcccggccggcggggccgctcctggggcctggagggcagccaggccctgagccagcaggccgaggtgattgtgcggcagctgcaggagctgcggcggctggaggaggaggtgcggctgctgcgggagaccagcctgcagcagaagatgaggctggaggcccaggccatggagctggaggccctggcccgggcagagaaggccggccgggcagaggccgagggcctgcgggccgccctggccggggctgaggtggtgaggaagaacctggaggagggccggcagcgggagctggaggaggtgcagaggctgcaccaggagcagctgagcagcctgacccaggcccacgaggaggccctgagcagcctgaccagcaaggccgagggcctggagaagagcctgagcagcctggagacccggcgggccggggaggccaaggagctggccgaggcccagcgggaggccgagctgctgaggaagcagctgagcaagacccaggaggacctggaggcccaggtgaccctggtggagaacctgaggaaatatgtgggggagcaggtgcccagcgaggtgcacagccagacctgggagctggagcggcagaagctgctggacaccatgcagcacctgcaggaggaccgggacagcctgcacgccacagctgagctgctgcaggtgcgggtgcagagcctgacccacatcctggccctgcaggaggaggagctgaccaggaaggtgcagcccagcgacagcctggagcctgagttcaccaggaagtgccagagcctgctgaaccgctggagggagaaggtgtttgccctgatggtgcagctgaaggcccaggagtag

SEQ ID NO: 345110 - DNA, 951 bp, Artificial Sequence
  derived and/or modified sequence
atgttcccccccagcggccaccaggacgtgagcgagcggcggctggacactcagagaccccaggtgactatgtgggagagggatgtatcatctgaccggcaggaaccaggacgaaggggaaggagttggggcctggaaggaagccaggctctgtctcagcaggcagaggttatcgttcggcagcttcaagaacttagacgcctggaggaggaggtaagactcctgcgcgagacatccctgcagcagaagatgcggctggaggcccaagccatggagctggaggccttggcacgggccgaaaaagctgggcgcgcagaggctgaaggcctgagagcagcactggctggagccgaagtcgtgcgcaagaatctagaagaggggaggcagagggaactggaagaagtgcaaaggttgcaccaggaacagctttccagcttgacgcaggcccacgaagaggcgctctccagcttgacatccaaagctgaagggctagagaagtctctgtccagcctggagacccggcgggcgggagaggctaaagaactggctgaagcccaacgggaggccgagctgctgaggaaacagctgagtaagacacaggaggatcttgaggctcaagtaaccctagtggagaacttgcggaaatatgtcggcgagcaggtgccatcagaagtgcacagccagacttgggaacttgaaagacagaagttgctggataccatgcagcacctacaggaggatagagactctctgcacgctactgcggaactgctacaagtgagagtacaatcactgacccacatcctggccctgcaggaagaggaattaacaaggaaagtccagcccagtgactccctggaacccgagtttacccgcaagtgccaatccctcttgaatcgatggagagagaaggttttcgctctgatggtgcaactaaaggcacaagagtag

SEQ ID NO: 345111 - DNA, 951 bp, Artificial Sequence
  derived and/or modified sequence
atgttcccccccagcggccaccaggacgtgagcgagcggcggctggacactcaaaggccacaggtcaccatgtgggagagggatgtgtcttctgatcgacaagaacccggcagacgggggagaagctggggactggagggttcacaggccctgtcacaacaggcggaggtaattgtgcgacagcttcaggagctgcgcagactggaggaggaggtgaggctacttcgggaaacttctcttcagcagaaaatgagattggaggcccaggctatggagcttgaagcactcgctagggccgaaaaggctgggcgagcagaagccgagggcctccgggccgccctggcaggtgccgaagtggtgcggaagaaccttgaagagggacgccaaagagagcttgaggaggtccagagattacatcaagaacagttgtcaagcctgacccaggcccatgaagaggccctgtcctctctgacctccaaagccgaaggcttagagaaatcattgtcctctctggaaactcgtagggcaggcgaggcaaaagagttagccgaggcccagcgtgaggctgaattactgcgcaagcaattatctaagacccaggaggatttggaggcacaagtcaccctggtcgaaaacttacgaaagtacgtgggtgaacaggttccaagcgaagtgcatagccagacttgggagctggagcgtcagaagctgcttgacaccatgcagcacctgcaggaagacagagactcgctgcacgccactgccgaacttctgcaggtgcgcgtgcagagcctcacccatatactggccctgcaggaagaggaattgacgcgcaaagtgcagccaagtgattcactcgaacccgaatttacgaggaaatgccaatcactacttaaccgttggagggaaaaggtatttgctctaatggttcagcttaaagcccaggagtag

SEQ ID NO: 345112 - DNA, 951 bp, Artificial Sequence
  derived and/or modified sequence
atgtttcccccaagcggacatcaggacgtgtcagagcggcgtttggatacgcagcgcccacaggtaaccatgtgggaaagagatgtgtctagcgacaggcaggagcccggtcgcaggggtagaagttggggcctcgagggatcccaggctctgtctcagcaggccgaggttattgttcgccagctccaggaactgcggcgactggaagaagaggtgagactcttgagggaaactagccttcagcagaaaatgcggctggaggcacaggcaatggagctggaagcactcgccagagccgagaaagctgggagagccgaagcagaaggcctacgggcagccttagcaggggcagaagtggtcaggaaaaacttggaggaaggcagacagcgcgaactggaggaggttcagagactgcatcaagaacagctgtcttctctgacccaagctcacgaagaagccctgagttcgctaaccagcaaagctgaagggctggaaaagtctttgagcagcttggagacaagacgggctggagaagccaaggagcttgcggaggctcagcgtgaggccgaactgctcagaaagcagctgtcaaagactcaagaggatctcgaagctcaagtcacgctggttgagaatctccggaaatatgttggcgaacaggtgccctctgaagtgcactctcagacttgggaactggaacgccagaaattgctggacacgatgcagcatttacaggaggatcgcgattctctgcatgctaccgccgagctgctgcaggtcagagtgcagtcccttacccatattttagctttacaggaagaggaactgacccgcaaggtccaaccctctgactctctggaacctgagtttacccggaagtgccagtccctgctcaatagatggcgggaaaaggtctttgccctgatggtacagctgaaagcccaagaatag

SEQ ID NO: 345113 - DNA, 951 bp, Artificial Sequence
  derived and/or modified sequence
atgtttcccccaagtgggcatcaggacgtgagcgagcgtcgactggacacacagcgcccacaagtgacaatgtgggagagggatgtgtcatctgacagacaggagcctggaagaagggggagatcatggggcctggagggcagccaggctctgtcacagcaggccgaagtaattgttagacagctgcaagaactccgcagactcgaggaagaggttaggctgcttagggagactagcctgcagcagaaaatgcgattagaggcccaggccatggaactggaggccctggctagagcagagaaggcagggcgtgcagaggccgaaggacttcgcgcagcactggccggagccgaggtagtgcgcaagaatctcgaagagggtcgccagcgtgaactggaggaagtgcagagactacaccaagaacagttgtctagtctgacgcaggcacacgaggaggccctgtcttccttgacctccaaagccgaagggcttgagaagtctctgagctccctggagactaggcgcgctggcgaggcaaaagaactggcagaggcccagcgagaggcagaattgttgcgtaagcaactgagcaaaacacaggaggacttagaggctcaggtcactctcgtggagaatctccgcaagtacgtgggggaacaggtgcccagcgaagtgcactctcagacctgggaactggaacgccagaaacttctagatactatgcagcacctgcaggaggacagagattccctgcatgccacggctgagttacttcaggtgagggtgcagagcttgacgcatatcctggcattacaggaggaggagctgacccgaaaagtacaaccatccgacagccttgagcccgaattcaccagaaagtgccagtccttgttaaatcgttggcgcgaaaaagttttcgccctgatggtacaactgaaggcccaagagtag

SEQ ID NO: 345114 - DNA, 6474 bp, Artificial Sequence
  derived and/or modified sequence
atgtccgatcgctctggacccaccgccaagggaaaagacggcaaaaaatacagctcgctcaacctcttcgatacctataaggggaagtcactggagattcagaaacccgctgtcgcacctcggcacggcctgcagtccttgggaaaggtcgctattgccaggcggatgccaccgcctgctaacctaccatccttgaaggctgaaaataagggaaacgacccaaacgtatcactcgtgcctaaagatggtacaggctgggctagtaaacaagagcagtcagatcctaagtcttctgatgcctctacggctcagcccttagaaagtcaaccgctccccgcatcccagacaccggccagcaatcagcccaagaggcccccagctgcccccgaaaataccccgctggttccaagcggggtgaaatcctgggcccaagcgtcagtgacacatggtgctcacggtgatggtgggagagcaagctctctactctcccggttcagccgggaagagttccccacactgcaggccgcaggggatcaggataaagctgccaaggaacgcgagtctgctgagcaatcttcagggccaggaccctctcttagaccccagaatagcacaacctggcgggatgggggggggcggggaccagatgagctggaaggccccgatagtaagctgcaccacggccatgacccaaggggaggcttgcagcccagtgggcccccccagtttccgccatacagaggcatgatgccaccgttcatgtatcctccctatttgccctttccccccccatatggaccccaggggccgtataggtaccccacccctgatggcccatcccgatttccaagagtggcgggcccccgaggaagtgggcctccaatgaggttagtggaaccagttgggcggccatccattctgaaggaagataatctgaaagaattcgatcagttagaccaggagaacgacgatggttgggcgggtgctcacgaggaggtggattataccgagaaactgaaattttctgacgaggaggatggcagagattctgatgaggaaggcgctgagggccatagggattcccagtctgccagcggagaagaacgccctcctgaagcagacggaaagaaagggaatagtcccaactccgaacccccaacacccaaaacggcatgggctgaaacctctaggccccctgagacagaacctgggccgcccgctcctaagcctccactgccacctcctcacaggggccctgctggtaactggggacctcccggggattatcccgatcgcgggggccctccctgcaaaccgccagctcctgaggacgaggatgaagcatggagacagagaagaaagcaatcttcatcagagataagcttggctgttgaacgggctagacgccgacgggaggaggaggaaaggagaatgcaggaagagagacgggcggcatgcgcagagaaactcaagcgcctggatgaaaaattcggagccccagacaagcgcctcaaggcagaacccgcagcaccgcccgcagcaccaagcacaccagcacccccacccgccgtgcctaaagagttacccgccccccccgcgccgcctccagcaagcgctcccacacccgagaaggagcctgaagagccagctcaggcccccccagcccaaagcacccccacacctggggttgctgctgccccaacactggtgtcaggaggtgggtcgacgtcatccacatcatcaggtagctttgaggctagtccagttgaaccccagctgccaagtaaggaagggccagaacctcccgaagaagtgcctcccccaactacccctcctgttcccaaagtggaaccgaagggagacgggatcggacctaccaggcagccccctagccaggggctgggatacccgaaatatcaaaaatcactgcccccaagatttcagcgccagcagcaggagcagcttctcaaacagcagcagcagcatcaatggcagcaacaccagcagggctctgccccccccactcctgtgccaccctcccccccccagccggtgaccctgggggctgtgccagccccacaggcccctcccccaccgcccaaggccttgtaccccggtgcacttggccgccctccgcccatgcccccaatgaatttcgaccctaggtggatgatgattcccccatatgtggatccaagattattacagggcaggccaccactagatttctatcctccaggagtacatccaagcggacttgtacccagagaaaggtcagactctggcggcagttcctccgagccattcgaccgacatgctccagcgatgctaagagagaggggtacacctccagttgatccgaagctcgcctgggtgggcgatgttttcactgcaacacccgcagagccaaggcccttaactagcccattacgccaagccgcagacgaggacgacaaggggatgagaagcgagacgccgcccgtgcctcccccacctccctacctcgcttcttatcctggattcccagagaacggcgcccccggtccccctatatctcggttccctctggaggagccgggccctcggccgctgccctggcctcctgggagtgatgaagtggccaaaattcagactccaccccctaaaaaagagcctcctaaagaggaaacagcccaactcacagggcccgaggcaggacggaagccggccagaggggtgggatctggcgggcagggccctccgcccccaagacgagagagccgaaccgaaacgcgctggggcccacgaccaggttcctcgaggcgaggaattccaccagaagagccaggggccccccctcgacgtgcaggccccatcaaaaaacctcccccacctaccaaggtcgaagagctgccccctaaacccctcgagcagggcgacgagactccaaagccaccaaaaccagacccacttaagattacaaaagggaaactggggggccctaaggagactcccccaaatggcaatctgtctcccgcccccagacttagaagagactacagctacgaacgggtcggcccaactagctgtcggggcagaggtcgtggggagtacttcgcccgagggagaggattccgtggaacctacggggggcgaggacgcggtgcccgtagccgcgagtttcggtcataccgcgaattccggggcgatgatgggaggggcgggggcaccggtggccctaatcatcctcccgctcctcggggccgcacagctagcgagacaaggagtgagggcagtgagtatgaggagattccaaaaaggagaaggcagcgtgggtccgaaacaggaagcgagacccatgaaagtgacctggctcccagcgataaagaggctcccactccgaaagaggggactctcacccaagtcccactggctcctccaccacctggcgcacccccgagccccgccccagccaggtttaccgcacggggggggcgagtcttcaccccgcggggagttcctagcaggcgcggtcgcgggggcgggagacccccgccccaagtctgccccgggtggtctccccctgctaaatctctggctcctaaaaagccacctactggtcccctccccccgagcaaggagcctttgaaagagaaactaattccaggcccactaagtcccgtcgcaaggggaggaagtaatggaggcagcaatgttggaatggaggatggggagcgccctcgccgccgacgacatggccgtgcgcagcagcaggacaagcctccgaggttcaggaggcttaaacaagaaagggaaaatgctgctagaggatccgagggaaagccgtctctgacactgcccgcctccgcacccgggcctgaagaggctttaactactgtgaccgtggctccagctccgaggagagccgctgccaagagcccagacctaagtaaccagaatagtgatcaggccaacgaagagtgggagaccgcctcagaatcatctgactttacaagcgagcgccggggcgataaggaagctccccccccagtcctcctgactcccaaggccgtcggaacacctgggggcggtggcggtggagcagtgcctggcatttcagccatgtctcgaggggacctgtcacagagggccaaagatctcagcaaacggtcattcagcagccagcgacctggaatggagaggcagaaccgacgccccgggcccggcggaaaagccggctccagcggatccagcagtggcgggggcggtggtggaccaggcggacgaaccggcccaggacgaggggacaaacggtcttggccatcaccgaagaacagaagtcgcccgccagaggagcggcccccagggctgcctctcccgccacctcctccctctagcagcgcagtattcagattggatcaagtgattcatagcaatccggcagggatccagcaagctctggcccagctcagttcgaggcaggggtcagttactgccccgggtgggcacccgcggcacaagcccgggccccctcaggctccacagggtccttcaccacgcccaccaactcggtatgagcctcaaagggtcaatagcggcctttccagcgacccgcacttcgaagaacctggcccaatggtgagaggcgtaggtggaactcccagggactccgcgggcgtgtcaccctttcccccaaaaaggcgtgaaagacctccaagaaagccagaacttctgcaggaagagagtctgccgcctccccattcctcagggttcttaggttccaaacccgaaggtccagggcctcaggccgaaagcagggatacggggactgaagccctcaccccccatatctggaaccgcttgcacacggccacttcccgtaaaagctataggccctcctccatggagccatggatggagccgctgtcacctttcgaggatgtggcaggtactgaaatgtcccagagtgactcaggcgtggacctatctggtgactcacaggttagctcaggtccctgctcgcaacgaagcagcccggacggtggattaaagggagctgcggagggacctcccaagcgcccaggtggttccagcccgctgaacgcagtcccatgtgaaggaccccccggctctgagccccctcgacggccccctccagcacctcacgatggggataggaaggagttgccccgtgagcagcccctgccccctgggccaattgggacagaacgttcacagagaactgatcggggaacggaaccgggtcctatccggcccagccaccggcccggaccccccgtgcagttcggtacatcagataaggactctgacttgcgtctggtagttggcgactctcttaaagcagagaaggaactcaccgctagtgtgacagaggctattcctgtttctcgcgattgggaactcctcccctccgccgcggcatccgccgagcctcagtccaaaaatctggatagtggtcattgcgtgcccgagccgagtagcagcggccagagactgtacccagaagtgttttatgggtccgcaggcccatcttcaagccagatcagcggaggggcaatggactcccagctccacccaaattcagggggatttagacccggtacaccatcactccatccgtaccgttctcagccattatacctgccgccggggcctgcaccaccttcggctctcctttcgggagttgccctgaaggggcaattcctcgatttcagcaccatgcaggcaacagagctagggaagctgccagcaggtggagtcctgtatccccctccaagttttttgtactctcccgcattctgtcctagtccgctacctgacacctctttattgcaagtccgtcaagatcttccctccccctctgacttttacagcactcccctccaacccggaggacagtctggattcctgccaagcggggctcccgctcagcagatgctactcccaatggtcgactcccagttgccagtagtaaactttggcagtctaccacccgctccaccccctgcgccgccccctttatcactactgccagtgggtccagctttgcagcccccatccttggcagtgcggccgccgccagccccagccacaagagtcttaccaagtccggcgcgcccattccccgcttccttgggcagagccgaattgcacccggtggagctgaagccgtttcaggattatcagaaactctctagcaatctgggaggccccggttcctcacgcacacccccgaccgggaggtccttctcaggcctcaactcccgcctcaaggcaacccccagcacgtattccggggtgtttcggacccagcgtgtggatctataccagcaggccagccctccagatgccttgcggtggattccaaaaccttgggagagaacaggacctcctccaagagaggggccctccaggagagctgaagaaccaggctctaggggcgataaagaaccaggactgccccccccaagatag

SEQ ID NO: 345115 - DNA, 6474 bp, Artificial Sequence
  derived and/or modified sequence
atgtcagaccgatccgggccaacagctaaagggaaggatggaaaaaagtattccagtttaaacctttttgacacttacaaggggaaaagcctggagatccagaaacctgccgtggctccacgacacggactccaatctctgggcaaagtggccatcgctaggcggatgcccccgcctgctaacttgcccagccttaaggccgagaacaaaggaaacgatcctaatgtgtctctggtccctaaggacggaacaggttgggcctccaagcaggaacagagcgacccaaaatcttcagacgcatctaccgcacagccgccggaatctcagccactgccagccagtcaaacacctgcctccaaccagccaaagcgccctcccgccgcccctgagaatacgccgctagttccatccggcgttaagtcttgggctcaggcaagcgtgactcatggggctcatggcgatggagggcgcgccagctcgctgctcagcaggttttcgagagaagaatttccgaccctccaggctgccggcgaccaggacaaggcagcaaaagagcgtgaatcagctgaacagtcatcagggccaggaccttccctacgcccacagaacagcacaacatggcgcgacgggggggggagaggtccggacgagctggagggaccagactcaaagctccatcacggccatgacccaaggggaggactgcagccttctggcccaccccagtttcctccatacaggggaatgatgcccccctttatgtacccgccctatctgccttttccccctccctatggcccacaaggcccgtacagatacccaacgcccgatggaccctcaaggttcccccgggtggcaggccccagaggatcagggcctcccatgcgtttggtagagccagtgggtagacctagcatattgaaagaggataatctgaaagagtttgaccaattggatcaggaaaacgatgatgggtgggccggcgcccacgaggaagttgattatacagaaaagctgaaattttcagatgaggaggatggccgcgatagcgatgaagaaggagcagaaggccaccgagatagtcaatctgcttccggggaggaacgaccccctgaagccgacggaaaaaaaggaaacagcccaaatagtgagccgcccactccaaagacggcttgggccgagacaagtcgaccccctgagactgagcctgggccccccgcacccaagcctccactgcctcccccacaccgggggcccgcaggaaattgggggccacctggggattatccggaccgaggcggcccaccctgcaaaccgcctgctccagaggatgaagacgaggcatggagacagcgcagaaagcaaagctcctcggagattagcttagcagttgaaagggcccggcggagacgagaagaagaggagagacgcatgcaagaagaaaggcgcgccgcttgtgcggaaaagctgaagcgacttgacgagaagttcggcgcacctgataagcgcctgaaggctgagcctgctgcaccaccagccgctccttcaacccctgcacctcctcccgcagtgcccaaagagttaccggctccccctgcacccccacctgcatcggccccgaccccagagaaggagcccgaagagcccgctcaggccccgcctgctcagagtacgccgactcccggtgttgccgccgcccctaccctggtcagtggcggcggctctacatcctctacatcctctgggagtttcgaggcttctcccgtcgagccacaactgccaagtaaagaaggccctgagccacccgaggaggtgccaccccccacaacaccacctgtgccaaaggttgagccaaagggagatggtatcgggcccactcgtcagccaccctcacagggattaggctatcccaaataccagaagtcactgcccccccgctttcagagacagcagcaggagcagttactgaaacagcaacagcagcaccagtggcagcaacatcaacagggctctgctccccccaccccggtgcccccctcaccaccccagccggtgactctcggggctgttccagcgccacaggccccaccgcccccccccaaagcgctgtaccccggtgccctaggtcgccctccacctatgcccccaatgaacttcgaccctcgatggatgatgatacctccttatgttgatcctagactgctgcagggaaggcctcctctcgatttctatccccctggtgtgcacccctctggcctagtgccaagggaacgctccgactcaggcggaagttccagcgagcctttcgatcgccacgctccggcgatgcttagagagagaggaaccccgcctgtggatccaaaactggcgtgggtcggagacgtttttaccgccaccccggccgagcccagaccattgacgagcccactcagacaggcagccgatgaggatgacaaagggatgcgttcagagacaccacctgtacctccaccacctccatatctcgcctcctacccagggtttccagagaatggagccccgggcccgcctatcagtcgattccccttggaggaaccaggacctagaccattgccgtggccacccggcagtgatgaggtggccaagatacaaacccctcctcctaaaaaggagccgcccaaagaagagacagcgcagctcacaggtcccgaagccgggcggaagccggccagaggagtcggctcggggggacagggacctccgcctccacggagagagtctcgcaccgaaacacggtggggacctaggccaggctcttctcgtcgcggcattccccctgaggagccaggtgccccccccaggcgggctggtccgataaagaagccgcctcctcctacaaaggtcgaagaattaccacctaaaccgctggagcaaggcgatgaaaccccaaaacctcccaagcctgatccattaaaaataacaaaaggaaaactgggcggtcccaaagaaactccacctaatggaaacctctccccagcacctcgcctgcgcagggattatagctatgagcgggtcggccctacatcctgtagaggccgcggacggggggagtactttgcacgaggtagggggttcagaggaacctatggcggtagggggagaggtgcgcgctctcgcgagtttcgctcgtacagagaatttagaggagacgatgggaggggcgggggaactgggggaccaaaccacccccccgcgccacgaggacgcacggcaagtgagaccagatcagagggatctgaatatgaggaaattcctaaaagaaggagacagagggggagcgagaccgggagtgagacgcatgaatccgacctggcccctagcgacaaagaggccccgacccctaaggaaggcactttaacccaggtcccactggcgcctcctccacccggagctccccctagtcctgcacctgcacgctttacagcgcgaggcggcagggtgttcaccccgcggggagtacccagccgaagaggacgcggcggtggaagacctccccctcaggtgtgtcccggatggtcaccgcccgcaaagtctctggcacctaagaaaccaccaaccggaccactgccgcccagtaaagaacccttgaaagaaaagttgatccccgggccattgtctccagtggctcgcggcggtagcaatggaggatccaatgttgggatggaagatggcgaacgtccacggcggaggagacacgggagagcccagcaacaggacaaacctccccgatttaggcgcctcaagcaggagagggagaatgccgctcgaggctccgaggggaaaccttcccttacactgccagcctccgcgcctgggccggaggaggcactgacaactgtcacagtggcacctgcaccaagaagagctgcagccaagtcccccgatctgagcaatcagaacagcgatcaggctaacgaggagtgggagacggcctccgagtccagtgacttcacttctgaacgaagaggcgataaggaagcgcctccaccagtgttgctcaccccgaaagctgtcggtacgccgggcggcggcggtggaggtgcggtgccaggcattagtgctatgtcccgaggggatctctcccagcgtgcaaaggatctcagtaagaggtcatttagcagtcagcggcctgggatggagcggcagaatagaaggcccgggcccggaggcaaagccggatcatccgggagctctagcggggggggcggagggggcccaggcggccggaccgggccgggaagaggcgataaaagatcttggccgtctcctaaaaatcgatctagacctcccgaggagcggccccccggattgcccctcccacctccccccccttcatcctccgcagtcttcaggctggaccaagtcattcacagtaaccctgccggaatacagcaggcactagcccagcttagcagcagacaggggtccgtgacagctcctggggggcaccctcgacacaagcccggccctcctcaggcacctcagggcccatcgcccagacccccaactcgctacgagcctcagcgggtcaatagtggactgtcttccgacccccattttgaggaacccggacctatggttagaggcgtgggcggcaccccgagagatagcgccggcgttagcccattccctcctaaacgacgagagagaccacctagaaagcccgaactgctgcaggaagaatcactgccccccccgcacagctcaggctttttggggagcaagcccgaaggtcctggcccacaggctgagtcaagagacaccggcactgaggcactcacacctcatatctggaaccgcctgcatacggctacctccaggaaaagttaccgccccagctccatggagccctggatggagcccctgagtccattcgaggatgtggccggcaccgaaatgagccagtcagacagtggagtcgatctgtccggtgatagtcaggtaagttccggaccttgctcccaacgaagctctcccgacggtggactgaaaggcgcggcagaggggccccccaagcgacctgggggaagcagtcctctcaatgctgtgccttgtgagggtccaccaggatcagagcccccccgccgcccccctccagccccccatgacggcgaccgtaaagagctgccacgggagcagcctcttccgcccggccccatcgggacggagcgcagtcagcggacagataggggaacagaaccaggccctattcgaccttcacatagaccaggaccacctgtccaatttggcacctcggacaaagatagcgatcttaggctcgttgtcggagactcccttaaggcagaaaaggaactgacagcgagtgtgaccgaagccatcccagtgtcccgggactgggagctgctgccctccgccgctgcttcggctgaaccccaatctaaaaaccttgactcagggcactgtgtcccagaaccatcttcttcgggacaacgtctgtatcccgaagtgttctatggatctgctggtccctcctctagccagataagcggaggcgcaatggacagccagctgcaccccaattccgggggctttcggcctggcactcccagcctgcacccctacaggagccaacctctatatctccccccaggaccagccccaccatctgctctgctgtctggcgtggctctgaaaggacagttcctggacttctccacaatgcaggccactgagttgggtaagttacctgctggcggcgtcctttatccacccccatcattcctctattcccccgccttttgcccctctcctctgcctgacacctctctcctgcaggtccgccaggaccttccctcaccgtcagatttttattcgacccctctacagccgggaggtcagagtggcttcctaccatccggggccccagcacaacagatgctcttacctatggtggacagccagctcccagtagtcaacttcggtagccttcctcccgcccccccacccgctccccccccactgagcctgctgcccgtcggtcccgccttgcagcctccttccctcgctgtgcgcccccccccggcccccgccacccgtgtcctgccctctcctgctcggcctttccccgcaagcctcggcagggcagaattgcaccccgtcgagctcaaaccttttcaggactatcagaagctctcctctaatctgggaggacccggttccagtagaacacctcccacgggacgatcattcagcgggctcaattctagactcaaggctactccctccacctacagcggggtttttagaactcagagggtggatctgtaccaacaggcctcaccacccgatgccctcagatggatccctaaaccttgggagcggaccgggccgcctcctcgagagggccccagcagacgggctgaggaacctggaagcagaggcgacaaagagcctggcttgccgccgcctagatag

SEQ ID NO: 345116 - DNA, 6474 bp, Artificial Sequence
  derived and/or modified sequence
atgtccgatcgatccggcccaaccgctaagggcaaggatgggaagaaatactcttctctcaacctgttcgacacctataaaggtaaatcactagagatccagaagcccgccgtggccccgaggcatggattgcaatcacttggcaaagtcgcaatcgcaagaaggatgcctcctcccgctaacctgcccagcctgaaggccgagaataagggtaatgatccaaacgtctccctcgtaccaaaggacgggaccggctgggcctctaaacaagagcaaagtgacccgaagtcttcagatgcctctactgctcagcctctggagtcacagccgctgccggcatctcaaacccccgcctcaaatcagcctaaacggccgcccgccgccccagaaaatacacctctcgttccctctggcgtaaaatcctgggcccaggcttcagtcacccacggggcccacggcgacggcgggcgagcatcctccctgctgtctagattttctcgggaggaattcccaacactgcaggccgccggggatcaggataaggctgcaaaggagcgggaatcagctgagcagagtagcggcccaggtccttccctgagaccacagaactcaactacctggagggacggcgggggtcgtggacctgatgaactcgagggtcctgacagcaaactgcaccatggccacgaccctcgaggggggcttcagcccagcggcccaccgcagttcccgccatatcgcgggatgatgcccccttttatgtacccaccttacctccctttcccacctccatacgggcctcagggtccataccgctaccctactcctgacgggccctcacgcttcccccgggtggccggtccacgcgggtccggcccccccatgagattagtggaaccagtgggccggcctagtattttaaaagaggataatctgaaagaattcgaccagttggatcaagagaacgacgacgggtgggctggagcccatgaagaggttgattataccgagaaacttaaattctctgacgaagaagacggccgcgatagtgacgaggaaggcgccgagggccatcgcgactcacaaagcgcgagcggcgaggagagaccccccgaggcagacggaaagaagggaaactcaccaaacagcgagcctcctacgcccaagactgcttgggcggagacgtcacgcccacctgagacagaacctggaccccccgcccccaaaccgcccctgccgccaccgcataggggcccagcgggcaactggggcccccctggcgactatcccgataggggcggaccaccttgtaagcctccggcccctgaagatgaagacgaggcgtggagacagcgcaggaagcagagttcctctgaaatcagcctggcagtcgagcgcgctaggagacgccgggaagaggaagaaaggaggatgcaggaagagaggcgcgccgcctgtgcagagaagctcaagcgcctagatgagaaattcggggccccagataaaagattaaaagcggagccagctgccccccctgctgcaccatctactccagccccacccccagcagttcctaaagagctccccgcaccacctgcccctccaccagcttccgcaccaaccccagagaaggaaccagaagagcctgctcaagccccaccagcgcaaagcacccctacacctggcgtcgccgctgcaccgaccctggtgtctggcgggggctccaccagctcgacctcatccggctcatttgaggcaagccccgttgagccacagcttcccagcaaggaaggccccgaacctcccgaagaagtgcctcccccaacaactccccccgtgccaaaggtcgaacccaagggcgacggaatcggtcctacacgccaaccaccgtcacaaggcctgggatatcctaaataccaaaagtccctccccccacgcttccagcggcaacaacaggagcagctgctcaagcaacagcagcaacatcagtggcagcagcatcaacagggtagcgctccccccactcccgtgccaccctctcccccacagcccgttactctcggcgcggttccagccccacaggcaccccccccacccccaaaggccctgtaccccggtgctctgggccgtccacccccgatgccaccaatgaactttgaccctagatggatgatgattcccccctacgtggacccaaggttattgcagggacgccccccactggacttctatccacccggtgtccacccttcagggttagtgccgagagagcggtccgactctgggggctcctcttccgagccttttgaccggcatgcccccgcgatgctccgtgaacgagggacaccgcctgttgatccgaaactcgcatgggtgggtgacgtgtttactgcgacacccgccgaacccaggccactcacttcccccctccggcaagccgctgatgaggacgacaagggcatgagatcagagactcctccagtacccccgccaccaccatacttggcctcttacccgggattccctgagaatggagcaccagggccccctatatcaagatttccgctggaggaacccggacctagacctttaccctggcccccaggctcggacgaggtggcaaagatccagacaccacccccaaagaaagagccacccaaagaggaaactgcccagctcacggggcccgaggcaggaagaaaacctgcccggggagtcgggagcggcggacaggggccacccccaccccgacgggagtcacgaacggagacgagatggggcccacggcccggctcttcacgccgtggaattcctccagaagaacctggagcacctccaagacgggccggccctattaaaaaacccccgccacccaccaaggttgaggaactccccccaaaaccccttgaacagggcgatgagacccctaagccacctaagccagaccctctgaaaattactaaaggcaaactcggaggccccaaggagactccccctaatggaaatctctcaccggccccacggctgagacgtgattacagttatgaacgggtaggtccgaccagctgcaggggacgtggacggggagaatatttcgctcgtggccgcggttttcgaggaacatacggtggccgagggcggggggcccgtagcagggagttccggtcttacagagaatttcggggggacgacggccgcggcgggggcaccggagggccaaaccaccctcctgctccccggggccggaccgctagtgagacccggtctgagggatccgagtacgaagaaatcccaaaacggagacggcagagaggttctgagaccggatcagagactcatgaatcggacctggccccttcagacaaggaggcccccaccccgaaagagggcacgctcactcaggtacccctggccccccccccccccggagctcccccttcaccagcccctgcgcgttttaccgccaggggagggcgggtgtttacacccagaggggttccctcccgccgaggtcgcggcggcggaaggccacctcctcaggtgtgtccgggttggagcccccccgccaagtcccttgccccaaagaaaccccctacaggcccactacccccttccaaggagcccctcaaagagaaactcattcctggtcccctctctcccgtggcccgcggcggatcaaatggcggaagcaatgtcgggatggaggatggagagcgacctcgaaggcgccgccatggcagagcccaacagcaggataagccacctcgctttcgtcgactgaaacaagaaagggagaatgctgcccggggctctgagggcaagccttccctgacactcccagccagcgctccgggccctgaggaggctctgaccaccgtcaccgtcgcacccgcccctcgtcgagcagccgccaagtcaccagacctgtcaaaccagaacagcgaccaggctaatgaggagtgggagactgcatcagagagtagtgattttacctctgagcggcggggagacaaggaagcgcctccaccagttctgctgaccccaaaagccgtgggaactccaggggggggaggagggggagccgtgcccggcatatccgcgatgtcccgtggcgacttaagccagagggccaaggatctcagcaagcgtagctttagctcccaacggcctggtatggaacgtcagaatagacggcctggccctggtggtaaggccgggtcttcggggtcatcttcaggcggaggggggggaggtcctggcgggcgcacggggcctgggaggggtgataagcgatcatggccatctcctaagaaccgatcacggcccccggaggagcgacctcctggcctgccccttcctccaccacctccatcgagctcggccgtgttccggctggaccaggtaatccacagtaatcccgcaggtatccaacaggctttggctcaactgtcctcccggcaggggagtgttacagctcctggcggacatccacgccacaaaccaggacccccgcaggccccccaagggcccagccctcgcccccccaccagatatgagccccagagagtcaactccggactctccagcgatccgcacttcgaggagccagggccaatggtgagaggtgtgggcggaacccccagggattctgccggcgtctccccattcccgcccaagagacgtgagcgacccccccggaaacctgaactgcttcaggaagaaagtctgcctcccccccactcaagcggctttctgggatctaagcccgaaggtccaggcccgcaggcagaatccagggatacgggcaccgaggctctgaccccacatatatggaatcgattacacacggcaactagccggaagtcttacagaccatcatccatggagccatggatggaacctctgagcccattcgaggacgtggctggaactgagatgagtcagagtgatagtggtgtggatctgtccggcgatagccaggtctctagcggaccttgctcacaacggagctctcccgacggtggactcaaaggagctgctgaagggccacccaagcgcccaggcggttcctcgccattgaacgccgttccttgcgaggggccgcctggtagcgagcctccgagacgaccaccaccggccccccacgatggcgatcgcaaggagttacctagagaacagcccctgcctcctggtccaatcggcactgaaagaagccagaggactgaccgcggcaccgagcccggccccatccggccatctcaccggcccggacccccagttcaattcggaactagcgacaaggatagtgacctcagactggttgtgggggactccttaaaagctgaaaaagaactcacagcatccgtcaccgaagccattcccgtctctagagactgggagctgcttcctagtgctgccgctagcgccgagccccagtctaaaaacctggactccgggcactgtgtgccagagcctagtagttccggacagagactgtatccagaggtgttttacggatcagcaggcccttccagctcgcaaatctctgggggggccatggattcacagttgcaccccaatagtgggggctttcggccaggcaccccctccttacatccctatcgcagtcaacctctgtatctgccgccaggcccagccccacctagcgccctgctctccggggtcgccctcaagggccagttcctggacttcagcaccatgcaagcgacagaactgggaaaacttccggccggaggggttctgtacccgcctcccagcttcttgtacagccccgcattctgtccctcaccccttcctgacacctcccttcttcaagtacgccaagacctaccttcaccctccgatttctacagcacccctctccagcctggggggcagtccgggttcctccctagcggtgcccccgcacagcagatgttgctgccaatggtggacagccagttgcccgtggtgaacttcggatctttacctcctgcccctccaccggccccccccccattgtccctgctgccagtcggcccagccctccagcccccgtcactcgctgtgagacccccccctgcgccggctacgcgtgtgttgccctccccagcaagacccttccctgcctctctgggccgagccgaactgcatcccgtcgagctgaagccctttcaggattatcagaaactctcgtctaatctgggcgggccagggtcctccagaacccctcccactggccgttctttttctggattaaactctcgactgaaagcaacccctagtacctactcaggagtgttccgaactcaacgggtggacttgtatcagcaggcgagcccacctgacgcactgaggtggatccctaagccctgggagagaacagggcccccacctagagagggacctagccggcgggccgaggagcccggatctaggggggataaggaacccgggcttccaccaccccggtag

SEQ ID NO: 345117 - DNA, 6474 bp, Artificial Sequence
  derived and/or modified sequence
atgtccgatcgttctgggcctaccgccaaggggaaggacggaaaaaagtattcctcacttaacctgtttgacacctataaaggcaagtccctcgaaatccagaagcccgccgtcgcccctagacacggtttgcaatctttgggcaaggttgccatcgcaaggcggatgccaccccctgccaatcttccctccctgaaagcggaaaataaggggaacgatcctaacgtgagcctggttccaaaggacggaaccgggtgggctagcaagcaagaacagagcgaccctaagtccagcgatgcctccaccgctcagccaccggagtcccaacccttgcccgcctctcagaccccagcctcaaatcagcctaagaggcctccagcagctccagagaatacgccacttgtcccatccggcgttaaatcatgggcacaggcttctgtaacacacggagcgcacggtgacgggggtagagctagtagcctgctgagcaggttctcccgtgaagaattccctaccctacaggcagcgggagaccaagataaagccgctaaggaacgagaatctgctgagcagtctagcggccccgggcccagcttgagaccccagaactctaccacctggagggatggaggaggtcgcgggcccgacgagctcgaaggaccagactccaagctgcaccacggacatgaccccagaggaggactgcaaccgtcgggtcccccacaattcccaccgtacagaggcatgatgcctccattcatgtaccctccctatctgccattcccccccccatatggaccacagggaccgtaccggtatcccacccccgacggccctagcagattcccccgggtggccggtccgcgaggaagcggcccccctatgcgcttggttgagccggtgggacggcctagcatattgaaagaagacaacctgaaagagtttgaccaattagaccaagaaaacgatgacggttgggccggagcccacgaggaggtagattataccgaaaaacttaaattctcggacgaggaggacggacgggactctgacgaagagggagcagagggacaccgggattcccagtccgcttcaggggaagagaggccacccgaagccgatggaaagaagggaaattcccccaacagtgagccccccacccctaaaaccgcatgggctgagacgagcagacctccggaaaccgaacccgggccaccggccccaaaaccccctcttcctcccccccataggggacccgccggaaattgggggccgccaggcgattaccccgaccgggggggacctccttgcaagcccccggcaccagaagatgaagatgaagcctggcgtcaacgaaggaagcagtccagctccgagatctccctggctgtggaacgggcaaggcggcgcagggaagaagaagagaggcgaatgcaggaggaacggcgcgcggcctgtgccgaaaaattgaagagactggacgaaaagttcggagcccccgacaaaaggttgaaggctgagcccgctgctccccccgccgctccatccacacccgcgccaccccccgccgttcccaaagagctccctgccccacccgcaccaccacccgcttcggcacctacgcccgaaaaggagcccgaggaaccggctcaagccccccctgcacagagtactcctactccaggcgtcgctgccgctcccacgctggtttccggcggagggtcaaccagtagcacaagttctggctcttttgaggccagtcctgtggaacctcagttgccctcaaaggaaggtccggagccgccggaggaagtgccacctcctaccactccaccagttccaaaggtcgagcccaagggagacggaattggacctactcggcagccgccttctcagggactcgggtaccccaaataccagaaatcccttccgcctcgctttcagcgtcagcagcaagagcagctgctcaagcagcagcagcagcatcagtggcagcagcaccaacagggctccgcaccgcccacgcccgtaccaccgtcgccacctcagccagtgaccttgggcgcagtgccagccccacaggccccaccgccacctcccaaggccctgtatcccggggccctgggcagacctccacctatgcctcccatgaactttgatccccgctggatgatgatacctccgtacgtcgaccctcgcctgttacagggccggccaccgctagacttttatcccccaggcgttcacccaagtggcctggttccgagagaacgttccgatagcggcggcagtagtagcgagccatttgaccgtcatgccccggccatgctccgcgagcgggggacacctccagtggacccaaagttggcttgggtgggtgacgtgtttaccgctacaccagccgagccccgccccctgaccagtcccttgcggcaggctgccgatgaagacgataaaggcatgcgatccgaaaccccaccagtgccaccacccccaccttacttagcttcttatccaggatttcccgagaatggggctccaggaccacccataagcagattccctctggaggagcccgggcctaggcccctaccatggccacccggctctgatgaggtggccaagatacagacgccccccccaaagaaagagcctcctaaagaagaaactgctcagctgacaggcccggaggcaggtcgaaagccggcacggggggtggggtcagggggccaaggcccgcctcctcctcgtcgagagagccggacggagaccagatggggcccgaggccgggcagcagccggcgaggaatacctccagaagagcctggggctccgcccaggagggctggtcccattaaaaaacccccgccacctaccaaggtcgaggagctgcccccaaagccacttgaacagggggatgaaactcccaagccccccaaaccagaccctttgaaaataacaaagggcaagctgggcggacctaaagagacgcccccaaatgggaatttaagtccagcacccaggctacgaagggattactcttacgagcgggttggtcctacaagctgtagggggcggggccgaggagagtactttgcgcgcgggaggggcttcaggggaacatacggtggacgaggcagaggggcccgatcacgggagttcagatcttatcgcgaatttcgcggagacgacggcagaggtggcggtacaggagggcctaatcaccccccagctccgcgtggacgcacggcttcagagaccaggtccgagggatcagaatatgaagagattcctaaaagacggcgtcagagaggctctgagaccggctcggagacacacgagtcggatctcgctccgtcagacaaggaggcaccaaccccaaaggagggtacgctgacacaggtgcctttagcgccaccccctcctggcgcccccccttctccggcccccgccagattcaccgcgcgtggggggagagtctttaccccaagaggtgtcccgtctcgcagggggcgcggaggaggtcgccccccaccacaagtctgtcccggttggtcacccccagctaagtccctggctccaaaaaaacctcccacggggccgctgcctccctcgaaggagcccctcaaggagaaattgatcccgggtccactgtcccccgtcgcccgggggggctcgaacggggggtctaacgtgggcatggaagatggagaacgcccccgaagacgccggcacggcagggcacagcaacaagataagccgccgaggtttagacgtctgaaacaggaaagggagaatgccgctcgaggaagcgaaggtaagccgtccttgacattaccagcttcagctcccggcccagaggaagccctcactacagttactgttgctcccgctccccggcgggccgccgccaaaagccctgatttgtccaaccagaacagtgaccaggcaaatgaagaatgggagaccgctagcgagagtagcgatttcacctcggagcgccgtggcgacaaggaggccccaccaccagtgttgctgacaccaaaagccgtcggcacgccaggtggagggggcggtggagctgtgccagggatatcggcaatgagcagaggagatttgagtcaaagagccaaggatctgtctaaaaggtcttttagctcccagcggcctgggatggaacgacagaaccgtcgacctggccccggggggaaggctgggagttctggctcaagctctgggggaggcgggggtgggccaggaggacgtacaggaccaggacgcggagacaaacggtcttggccttcacccaagaacagatctaggccacctgaagagaggcctccaggtctgcccctgccaccccctccaccatcgtcctctgctgtctttcggctggaccaggtaatccattccaacccagcaggcatccagcaagccctggcgcaattgtctagcagacaggggtctgtgaccgcaccgggggggcatccgcgccataagcctggcccacctcaggccccccagggcccaagcccgcggcccccgacacgttacgaaccacaaagggtgaacagtggattgtcctccgatccgcacttcgaagaaccgggccctatggtgcgcggggtcggaggcaccccaagagattccgcaggggtctcccccttcccacctaaaaggcgagaaaggcctcccaggaagcctgagctgttgcaggaagaaagtctgccccctccccattcctcaggcttcctcggttccaaacctgaaggacccggaccccaggctgaatcacgtgacactggcacggaagccctcacaccccacatatggaataggctgcacaccgctacgagccggaagtcatatcgtccgagctccatggagccttggatggagccactgtcgcctttcgaagacgtagcaggcacagagatgagtcagagcgacagtggagttgatctttcaggcgacagccaggtgagttcaggaccttgtagccagagaagttctcctgatgggggccttaagggagccgctgagggccctcccaagagacccggcggaagctctccactcaatgccgttccatgtgaaggacctccaggaagcgagcccccaagaagaccgccccccgcaccacacgatggcgataggaaagaactaccacgagaacagcctctccctccaggacccattggcaccgagaggagccaaaggactgacagagggacagagcccggaccaatacggccaagtcatagaccgggaccaccggtacagtttggtaccagcgacaaggacagtgatttaaggctcgttgtaggggattcactaaaggctgaaaaggagctaactgcgtctgtgacagaagccattccagttagcagagactgggagctgttgcccagcgctgccgcctccgccgagcctcagagtaagaatctagactctgggcactgtgttcccgagccctcctcctcggggcaacgcttgtaccctgaagtgttctacgggtctgccggcccgagtagcagtcaaatatctgggggcgcaatggactcccagctgcaccctaatagcggtggtttccgccccggcaccccatctctgcacccttacaggagtcaacccttgtatctgcctcctggaccagctcctccttcagcactgctgtcaggcgttgcattgaaagggcaattcctcgattttagtactatgcaagccactgaactcggcaagctccccgctgggggagttctgtacccacccccatctttcctgtacagccctgccttctgccccagtccattacccgacacatctcttcttcaggttagacaggacttgccctccccctctgacttttattctacgccattacaacctgggggccagtccggtttcctgccctcgggcgctccagctcaacaaatgctcctcccaatggttgactctcaactgcctgtggtgaatttcggaagccttccaccagccccccccccagcaccccccccactaagcctcctgccagtgggccccgccctccagccacccagtctggccgtgaggccaccaccggcgcctgccacccgcgtcttaccctctcccgcaaggccgtttccagccagcctgggccgagcggagctgcatcctgtggagctcaagccatttcaggactaccaaaagctgagtagtaatctgggtggccctggaagttctcgcacacctccaacgggaaggtcattctccggcctgaacagccgcctcaaggcaactccttccacttacagtggtgtgtttcggacccagcgcgtagacctataccagcaagccagcccgccagatgccctgcgttggatccctaaaccttgggaacgaactggtccacccccacgggagggaccttccaggagagcagaggagcctggatcaaggggggacaaggagcctggactaccccctcctagatag

SEQ ID NO: 345118 - DNA, 6417 bp, Artificial Sequence
  derived and/or modified sequence
atgtccgacagatcagggccaaccgctaagggaaaggatgggaaaaaatactcctctctgaacctttttgacacctacaaagggaagtccctggaaattcagaaacctgcagtggccccacgtcatgggctgcaaagcctaggaaaggtcgccatcgcacgcaggatgccacctcccgcgaacctgccttctctcaaagccgagaataaaggcaatgacccaaacgtaagcctggtgccaaaggacggaaccggatgggcctctaagcaggaacagtccgatcccaagtcgagtgatgcttctacagcacagcctctggagtctcaacccctgcccgcatcccagactccagcttctaaccagcccaaaaggccacctgcagcaccagaaaatacacccctggtcccaagtggcgttaagtcttgggcccaagcgtctgtgacccatggggctcacggagacggcggtagggcaagcagtttgctgagtcgattctcccgtgaagaattccctactctgcaggcggctggcgatcaggacaaagccgcaaaagaacgcgaaagtgcagagcagtcaagtggcccaggtcccagtctgcgaccacagaactctacgacctggcgagacggcggtggaaggggccccgatgagctggagggcccagactctaaattacaccatgggcacgacccacggggtggacttcagccctccggcccacctcagtttcccccctatagaggcatgatgccgccctttatgtacccaccatatctgcccttcccccccccctacggaccacagggaccctatagatacccaacccccgacggcccttctcgcttccctagggtcgccggtcctagaggcagcggccctcccatgcggcttgtggaaccggtgggacgccctagcattctgaaagaggacaacctgaaggagttcgatcagctggatcaggagaatgacgatgggtgggcaggcgcacatgaggaggttgattatactgaaaagttgaaattttcggatgaagaggacggacgggactcagacgaagagggggcagagggacaccgagactcacagtccgctagtggagaggagaggccaccagaagccgacggaaaaaaaggcaacagccccaacagcgagcccccaacacccaagaccgcttgggccgagacctcccggccgcccgagaccgaacccggcccacctgctcccaagcccccgctgccccctcctggagattaccccgatcggggcggccccccttgtaagcccccagcacccgaagatgaagatgaagcttggagacaacgccgcaaacagagcagctccgagatttcactggccgtggaacgcgccaggcggcgcagggaggaagaggagcggagaatgcaggaggaacgccgggctgcctgcgcagagaagcttaagcgcctggacgaaaaatttggggccccagacaagaggctgaaagcagaacctgcagctcccccggctgctcctagcacgcctgctcctccacctgcagtgcctaaagagcttccagcccctcccgccccaccacccgccagcgccccaacccccgaaaaagagccagaggaacctgcgcaggctcctccagctcagagcacacccacgcctggagtggccgctgctcctactctggtgagcggaggcggttccacgtctagtacctcctctggctcttttgaagcgagtcccgttgagccccagttgccatctaaagaaggccccgagcccccggaggaggtgcctcctccaaccactcccccagtcccaaaagttgaaccaaagggagatggtatcggcccaacccggcagccaccctcccaaggcctgggataccctaaataccagaaaagcctgcccccgcgttttcagaggcagcagcaggagcagcttctgaaacagcagcaacagcaccagtggcagcaacaccagcaagggtccgctcctcccacccctgtgccaccctcccccccacagcctgtgactctcggagctgtaccagcgcctcaggcaccgccaccgccccccaaggcactctaccccggcgccctgggacggcccccccctatgccccccatgaatttcgaccctcgatggatgatgattcctccctacgttgatcccaggctgctgcaggggcggcccccactggacttctacccccctggagtgcatccaagcgggctggttccacgcgagcgttctgatagcggtggttcctccagcgagcctttcgatcgacacgcgccagctatgctgcgcgagcgggggacacccccagtcgatcctaagctggcctgggtaggtgacgtgttcaccgctactcctgctgagccccgccctctcacttctcctttaaggcaagccgcggacgaagatgacaaaggaatgcgatctgaaaccccccctgtgccccccccacctccatacctagcttcataccccgggttcccagagaatggggcacctgggcctcctatatctcgcttccctctggaagagcccgggcccaggcccctgccatggccgcctggatcggatgaggttgcgaagattcagacacctccccccaagaaggagcctccgaaagaggaaaccgcccagctgaccggcccagaagccggacgcaagcctgctcgcggagtgggcagcggaggccagggacctccccctccccggcgcgaatcacgcacagagacacggtggggtcctaggcccggttcctcgcgtagaggaattcctccggaggagcctggcgctccaccgcggagagctggacccatcaaaaagccacctcccccaacaaaagtcgaagaactgccaccaaaacctctagagcagggggatgagactcccaaacccccgaagcccgacccacttaagattactaaggggaagctgggtgggccaaaagaaactcctcctaatggaaacctcagccccgcccctcgacttagacgggattatagttatgaacgagtgggaccaacttcttgtcgtggcagagggcggggcgagtatttcgctcgagggcgcgggtttagaggaacctacggaggcaggggcagaggcgcagctggcaatagcgctgtcaccgagtcattcgaggaaatgatgggggtcgaggtaggtcagggggaccaaaccaccctactgctgccggaagcagcactccccgctcgccatggagctagggtccaaagcatgcggaagtctcctagcggcgccggctcaggggctcaaaagcaggcagctagaccaatgagagtgatctggctgctgcagacaaggcggttgccgcacccccggcgtgagcattccccacgctcaagaagtccaactaccagatcccccacattccctgccccagccagattcacacccggggttggagagtccagcctgccagagggtataagccccgggcccaggcggcgggaaccaccccaggtttgcccgggttggagccctcccgctaagtcactcgcacccaagaagcctcccactggacctcttccgcctagtaaagagcctctgaaggaaaaattgattccagggcccctgtccccggtggccaggggtggcagcaacggaggcagtaacgtggggatggaggacggtgagcgaccgagacgtaggcggcacggccgcgctcaacaacaagataagcccccaagattccgtaggctcaaacaggagagggagaatgccgcccgcggatcagagggtaaacctagcttgaccttgccagcatccgctcccggtccagaggaggctctgactactgttacagtggctccagcgccgcgaagggctgccgcaaagtctccggatttgtcaaatcaaaacagcgatcaggcaaacgaggagtgggaaaccgcctccgagtcttcagatttcacttccgaacgaaggggtgacaaagaggctccccctcccgtcctgctcacacccaaagccgtgggcacgccgggcggaggcggtgggggcgccgtgcccggaatctccgcaatgagtcggggagacttatcccagagggctaaggacttaagtaagagatctttcagttcacagcgcccgggaatggaacgccaaaataggcgtcctggccctgggggcaaggccggcagttctggaagcagctcaggtgggggaggtggcggtcctggaggcagaaccggtcctggccgcggcgataagaggtcatggccatctcctaagaaccgcagtcgacctcctgaagagcggccacctgggctgccgctcccccctcctcctccttcctcctctgccgtgttccgcctcgatcaggttattcattcaaacccagcagggatacagcaggctctggcccagcttagcagcagacaaggatccgtgaccgctcccggaggccaccccaggcataagccgggcccaccacaggctccccagggcccgtccccccgtcccccgacccggtacgaaccccagcgggtgaactcaggcctatccagtgacccccacttcgaagaaccaggacctatggtgagaggtgtcggggggacgcctagggacagcgccggagtttctccattcccgccaaagaggagggagcgccctcctcgaaaacctgagctcctgcaggaggaaagcttgcccccacctcacagttcagggtttcttgggtccaaaccagagggaccgggtcctcaggccgagtcccgcgacacaggcactgaggccctaacacctcacatatggaatcgactgcacacagctacatcacgcaagagctataggccatcgtccatggagccatggatggagcccttgtctccgttcgaagacgtggcaggaactgaaatgtctcagagtgacagtggcgtcgatctgtctggggacagccaggtcagcagcggcccctgtagtcagagatcttccccagacggtggactgaaaggagccgcagagggacctccgaagagacccgggggctcatcacctctaaatgctgtgccttgtgagggtccccctggtagtgagccaccccggagacccccaccagccccacacgacggggaccgaaaggaactgccaagggagcaaccattgccgcctggccctatcggcacggagaggtcgcagcgcaccgatcgggggacagagccaggaccaataaggccaagccaccggcccgggccacccgtccagttcgggacaagcgataaagacagtgatctcaggctggtcgtgggcgacagtctgaaggctgaaaaggagttgacagcttcggtcacggaggccattccagtttccagagactgggagcttcttccgagcgctgccgcctccgccgaaccccagtcgaagaacctcgactccggacattgcgtgcccgagcccagttcgtctgggcagcggctgtacccagaagtgttctatgggtcagccgggccatccagcagccagatctcgggggggcatggtctctcaatcacgtccaagcagtggcgacggccaggcaccccctccctgcacccatacagatcccagcccctttacctgccgcccgggcccgcaccgcccagcgccctactgtccggagtagctcttaagggccaattcttggacttttctaccatgcaggctacagagctcggcaagctcccagcggggggcgtcttgtacccacctccctctttcctgtattcaccagcattctgcccatctcccctgcctgatacctcccttcttcaggtgaggcaggacctgcccagcccttctgacttttactccactccgctccagccagggggccagagcgggtttctccctagtggagcaccagcgcaacagatgctccttcccatggtggactctcagcttcctgttgtcaatttcggaagcctgccccctgcccctcctccagcccccccacccctcagcttgctgcccgtgggccctgccctgcagcccccttccctggcagtcagaccaccgcctgcccctgctactcgggtgctgccctctccagcaaggccattccctgccagtctggggcgcgctgaactacaccccgtggaattaaagccctttcaggactatcaaaaactttcaagcaacctcgggggccccggaagtagcaggacccctcccactggtcgctctttctctggcttgaactccagactcaaggcaacaccctccacttacagtggagttttccggacccaaagggtcgatttgtaccagcaggcctctccgccagacgcattgcgctggatcccaaagccttgggagcggacaggtcccccaccaagggaagggccctctaggcgggcagaggagccaggaagcagaggggataaggagccaggtctgccccccccaaggtag

SEQ ID NO: 345119 - DNA, 6417 bp, Artificial Sequence
  derived and/or modified sequence
atgagtgaccgatctggcccgacagccaaaggtaaagatggcaaaaagtactcctcactgaatctttttgatacctacaaggggaagtctctcgagattcagaagccggccgtggccccacgtcacggcttgcaaagcctgggcaaagtggccatcgcccgtagaatgcctccccctgcaaatctgccgtccttgaaagcagaaaataaaggcaatgatcccaatgtttctctggtccctaaggatggaacaggctgggcttcaaagcaggagcaatccgatcctaagagctccgatgcttcaactgcccagcccccggaatcacagcctctgccggccagtcagactccagcatcgaaccagcccaaacggcctccagccgctcccgaaaatacgccgcttgtgccctcaggagtgaagtcatgggcacaggcatccgtcacacacggcgctcacggagatgggggacgggcatcctccctattgtctagattttctcgcgaggaattccctacccttcaggccgctggcgaccaagataaagccgctaaagaaagggagtcggccgagcagtcctcgggccctggccctagcttgcgacctcagaactcaaccacctggagagacggaggcggaaggggacccgatgagttagagggcccagactccaaactgcatcacggccatgatccccgcggaggcctccagcccagtgggccgccccagttcccaccgtatagaggaatgatgcccccgtttatgtaccccccgtatctgccctttcctcctccctatggcccccagggtccttatcggtacccgacccccgatggaccaagccgttttccaagagtggccggccctcgtgggtccggtccaccaatgaggctggtggagccagtgggcaggccatccatcctgaaggaagacaacctgaaggaattcgatcagttagatcaggaaaacgacgatgggtgggcgggcgctcacgaggaagtggactacactgaaaaactaaaattcagtgacgaagaagacggccgggactctgatgaggagggcgcagagggccatcgggactctcagagcgcgtctggcgaggagcggccccccgaggctgatggaaagaaaggcaattctcccaactcagagccccctacgcctaaaaccgcctgggctgagacaagcagacctcccgagaccgaaccaggacctccagctcccaagccgccactgccccccccaggcgattacccagatcggggcggtccgccgtgcaagcctcccgcccccgaagatgaggatgaagcctggcgacagcggcgaaaacaatcatctagcgaaatttcgctagccgtggagagggccagacggcgaagggaggaagaggaacgacggatgcaggaggaaaggcgtgcagcctgcgccgagaaactgaagaggctcgacgagaagtttggggcccctgacaaacgactgaaggccgaacccgccgcacctccagccgcccccagcacccccgcgccaccccccgctgttcccaaagagctgcctgcgcctcctgcaccaccacctgcatctgccccaactccagaaaaagagccagaggaaccagcccaggcccccccagcacaatccacccccacgcccggtgttgccgccgcacccactctagtctccggtggcggctccactagttccacttcgtccggatcctttgaggcaagcccagtggagccacaactgccttcaaaggagggccccgaaccccctgaggaggttcctccacccacaacaccgcctgtccccaaggtcgaaccgaagggagacggcatcggccctactcgacaaccaccatcccagggactgggttatccaaaataccagaaatctctgcctccaagattccagcgccagcagcaggaacagctcctgaagcagcagcagcagcatcaatggcaacagcaccagcagggaagcgctccacccactccagtgcccccctctccacctcaacctgtgacgctcggagcagtgcccgcacctcaggccccaccccccccccctaaggcactctaccccggagctcttggaagacccccccccatgcctcctatgaattttgaccccaggtggatgatgatacccccatatgtcgacccgaggctccttcaggggagaccgccactggatttctacccacctggggtgcaccctagtggactggtgcctcgcgagcgttcagattccggtggatcttccagtgagccctttgacagacatgcacctgcaatgttaagggagagaggaaccccccctgtggacccaaaattggcctgggtgggggacgtattcaccgcgacgcctgctgagccacgcccactgacatcccctctgaggcaagccgccgacgaggacgacaaaggtatgaggagcgaaactccccccgtaccacccccgcctccctatttggcctcataccccggcttccctgagaacggcgctcctgggccacccatttcccgttttccgctggaagagcccgggccccgccccctgccgtggccgccaggttcagacgaggtggccaagattcagaccccaccccctaagaaagagcctccaaaggaagagacagcccagctcaccggaccggaagccgggcggaagccagcccgtggcgttgggagcggtggacagggaccaccaccaccacgtagagagagtaggactgaaacaaggtggggtcctaggccaggcagcagccggaggggcattccacccgaggagccaggcgccccacctagaagggcgggccctatcaaaaagccgccacctcctaccaaggtagaagaattgcccccgaaacctcttgagcagggagatgagactcctaagcccccaaagcccgatccgctgaaaattactaaggggaagctgggcggacccaaagaaactccaccaaacggcaaccttagccctgcacccaggctgcgtagagactactcctacgagcgggtaggccctaccagctgtagagggagaggtcggggagaatacttcgcacggggacgcggctttcggggcacatacggaggacggggcaggggcgccgctggcaattccgccgtcaccgagtccttcgaagaaatgatgggcgtggaggttggtcagggcgaccagacaacactgctactccccgaagcagccctgcccgcccgccatggcgcacgagtacagtccatgaggaagtcaccgtctggggctgggtctggagcccagaagcaggccgcccgccctatgagagttatttggctactccagacaagacgattgcctcatcccagacgggaacactcgccaaggtcccgatctccaacaacacgttccccaacattccctgctccagctcgctttactcctggcgttggtgaatcctctctacctgaggggatttctcccggaccaaggaggcgggaaccaccacaggtgtgtccggggtggtccccgccagcaaaatcccttgcgccaaaaaagccccccacaggccccttgcctccatcgaaggaaccactcaaagagaagttgatccccgggccgttgtcccccgtggctcgtgggggaagcaatggcggttcaaacgtcggcatggaggacggtgaaagaccccggaggcggcgccacggtagagcccaacagcaggacaagcctccaaggttcaggagattaaagcaggaaagagagaatgctgcccgcggctccgaagggaagcctagcctgacccttccggcaagcgccccaggccctgaagaggccctgactaccgtgactgtggcccccgccccaaggagggcggccgctaaaagccctgacctaagcaatcagaactcggaccaagcaaacgaggagtgggagactgcgagtgaaagcagcgatttcaccagcgaacggcggggcgacaaggaagctccaccccctgtcttactgacacctaaggcagtgggtactcccggcggaggtggtggcggggcagtccccgggatcagtgctatgtcccgtggggatctgtctcagagagcgaaggatttatcgaaacgcagctttagctctcagcgtcccgggatggagcggcagaaccgcaggcccggacccgggggcaaagccgggtctagcggtagctcatccgggggtggtggcggcgggccaggcgggcgaacgggacccggtcgaggggataagagaagttggccgagccccaagaacaggtctcggcctcctgaagaaagacctcctgggcttccattgcccccacctcctccttcctcgagtgcggtgtttcgactcgatcaagtcatccatagcaatcccgccggcatccagcaggcattagcccaattgagctcgcgccagggctccgtcacagcacccggcggccatcccaggcacaaacctggtccaccccaggcacctcagggtccttctccccgcccgccgaccaggtacgaaccccagagagtaaattcaggcctgtctagcgatccacattttgaagagcctggaccgatggtgcgcggcgtgggaggaacaccccgggactctgccggagtgtctcctttcccacccaagagaagagagcggcctccacgtaaaccagaactcctacaggaagaaagtctgccccctcctcactcttcaggatttcttgggagcaaaccagaggggcccgggccccaggccgagtccagagataccgggaccgaggccttaactcctcacatctggaatagattacacactgctacaagccgcaagtcctaccgccccagctctatggagccctggatggagccattgagtccatttgaagacgtagccggcactgaaatgagccagtccgacagtggagtcgacctgtccggagactctcaggtttctagtgggccttgttcccagagaagctcaccggacggcggtctgaagggagcagccgagggtccacccaagagaccaggggggtccagccccttgaatgctgttccctgtgaaggcccacctggctcagagcctccacggcgacctccccccgcccctcacgatggggaccgtaaagaacttcctagagaacaaccccttcctcctggcccaatcggtacagagagatcccagcggacagaccgcggaacagaacccgggcccattagaccgtctcatcgtccaggacctcctgtccagtttggcacttccgacaaggattccgacttaagacttgtggtgggggatagcctgaaagccgagaaagaactaaccgcgtccgtcactgaggctatcccggtgagcagagactgggagcttctacctagcgcggccgcatctgccgaaccacagagcaagaaccttgattcggggcactgcgtgcccgaaccctcatcttcaggtcaaagattgtacccagaagtcttttacggctcagctggcccaagctcttcccagattagtggagggcacggcctgtctatcacaagtaagcagtggcgccggccaggcacgccaagtttgcatccgtacagaagtcaacctttgtacctgcctccaggaccggctcctcccagcgctttgctgtctggtgtcgctttaaaggggcaattcctcgatttcagcaccatgcaggcaaccgaactagggaaactccctgctggtggggtactttaccctccaccatctttcctatatagcccagcattttgtccatctcccctacccgacaccagtctgctccaggtgcgacaggacctgcctagcccctccgacttctactccaccccgctccaacccggcgggcagagtggcttcttgccatccggagcaccggctcagcaaatgctgctgccaatggttgattcccagctccccgtagtgaattttggcagtctgccacctgcccctccgcctgcacctccacctctcagcctcttgccagtggggccggccctccagcctcccagcctagccgtgaggcctccccccgctcccgccaccagggtccttcctagtcccgctagacctttccctgcgagcctaggacgcgctgagctacaccctgtggaactcaaacccttccaggattaccaaaagctctccagtaatctgggaggccctggcagcagccgcacgccaccgaccggtagatctttctcggggctaaactcaaggctgaaggctacaccatccacctactccggagtctttcggacccaaagagtcgatctgtaccaacaggcctctcctcccgatgctctaagatggatcccaaagccctgggagaggacagggccaccaccacgcgaagggccgagtagaagagccgaggaacctggaagccggggtgacaaagaacccgggttaccgcccccccgctag

SEQ ID NO: 345120 - DNA, 6450 bp, Artificial Sequence
  derived and/or modified sequence
atgagtgaccgctctggacctaccgcaaagggcaaggacggaaaaaagtacagttccttaaatttgttcgatacctacaagggaaaaagtctcgaaatacagaaaccagccgtcgccccccggcacgggctccaaagcctcggaaaggtagcaatcgcccggagaatgccaccccctgccaatctaccctcacttaaagcggaaaacaaagggaatgatcctaacgtcagcctggtccctaaagacggaacgggatgggctagtaaacaggaacagtctgatcctaagtcctcagacgcatcaactgcccagcctccagaatcgcagcccctgcccgcctcacagacaccggccagtaatcagcctaagaggccccccgctgctcctgaaaacaccccactggtgccgtcgggcgtgaagagctgggcccaggccagcgtgacacacggagctcacggcgacggcggtcgagccagttcattgttatctagatttagtcgggaagagtttccgacattgcaggccgccggcgatcaggataaagcagctaaggagcgcgaaagtgcagaacaaagttcaggacccgggccaagtctgcgcccccaaaactctaccacctggagagacggtggaggaagagggcctgacgagctcgagggtccagatagcaaactgcatcatggccacgacccccggggaggcctccagccatccggccccccccaattccctccataccgagggatgatgccccctttcatgtaccccccttacttgcctttcccgccgccatacggcccgcaggggccttataggtatcccacccccgacggcccttcgagattccctcgtgtagccgggccacggggctcgggcccccccatgaggctggtagagcccgtgggacggcctagtattctaaaggaggacaacctgaaagagttcgatcaattggaccaggagaacgatgatggatgggcgggagcacacgaggaggtcgattatactgaaaagctgaaattctcagatgaggaggatgggagggactcagatgaagagggcgccgaggggcaccgcgacagccagtccgctagcggtgaggagcggccccccgaggcagacggcaaaaaaggcaactccccgaattccgaacctcccacccccaaaaccgcttgggccgaaacctctagacccccagaaaccgaacctggccctccggctccgaaaccccccctgcctccaccccatagagggccagcaggaaactggggccctcctggagactacccagacaggggcggccccccctgcaaaccgcccgctccggaggacgaagacgaggcctggcggcagagaaggaaacagtcttcgagcgagattagcttggctgttgagcgggcacgaagaaggcgggaagaagaggagcggagaatgcaggaggaaagacgcgccgcctgtgccgagaagctgaaaaggctagatgagaaattcggggcaccagataaacgcctgaaagctgaacctgctgcacctcctgcagcccccagcacacccgccccaccccccgcagtgccgaaggaactccctgctcctccagcgccaccacctgcatctgccccaacccctgaaaaggaacccgaagagcccgcacaggcccccccagctcagagtactcctaccccaggcgttgcggccgctcctacactggtctcgggggggggatccacatcttcaacctccagcggcagtttcgaagcgagcccagtggaaccacaactaccctctaaggagggcccagagcctcctgaagaagttccccccccaacgacccctcccgtgcccaaagtggagcctaagggggacggcatcggtcctacgagacagcccccgagtcagggactaggatatcctaaatatcagaagtctctgccccctagatttcagaggcagcagcaagagcagttacttaagcagcagcaacagcaccaatggcaacagcaccagcagggctccgcaccacctacccccgtgccaccaagtccacctcaacctgtcacactcggggcagtccccgccccacaggcacctccacctcctcccaaggccttataccccggagcattaggccgcccaccgcccatgccacccatgaatttcgatccacgttggatgatgatccccccatatgttgatccaagattgctgcagggcaggcctcctctagacttctaccccccaggtgttcatcccagcggactggttcccagggagcggtccgactccggagggagttcaagcgaacccttcgaccgccacgcccctgccatgttgagggagagaggcacacccccagtggatccaaagctggcttgggtcggtgacgtcttcaccgccactccagcggaacctcggcccttgacctcaccactgcgccaggcagccgacgaagacgacaaaggaatgagatctgaaaccccccccgtaccaccaccacctccctacctcgctagttacccgggatttccggagaatggcgcccccgggccacctatatcccggtttcccctggaagaaccagggccacgccctctgccttggccgcctggctctgacgaggtagccaaaattcagactccacccccgaagaaggaaccaccaaaggaagaaaccgcccagctgacaggcccagaagcaggccggaagccagcccggggggtgggatccggcggccagggcccaccacctccgcgccgagaatcaaggactgaaactcggtggggtcctcgacctggaagcagccggagagggatcccccccgaggaacctggtgcccctccaagaagggcggggcctataaagaagcctcctccgccaactaaggtcgaggagcttccacctaaacccctggaacaaggcgacgaaacacctaaaccccccaagcctgatcctctgaaaattactaaagggaagttaggcggtccaaaggagacccctcctaacgggaacttatcacctgctccgcgcctgcgccgggattattcatatgagcgcgtgggacctacgtcatgcagaggtaggggtaggggggagtacttcgcccgtggtcgaggcttccggggcacgtacggagggcgaggcaggggcgcagcagggaattctgctgtcactgaaagttttgaggagatgatgggcgtcgaagtgggccagggagatcagaccaccctccttcttcctgaagcagcactgcccgcaagacacggtgcaagagtgcaaagtatgagaaaaagtccatctggggcgggcagcggggcgcagaagcaggcagcacgcccaatgcgggttatctggctacttcagacaaggcggctccctcaccctcgaagggagcactctcccagatccaggagtccaaccactcgcagtcctacctttcctgcccctgccagattcacgccaggggtgggtgaaagcagcctgcctgagggcatttccccgggaccccgccggcgagaacccccccaagtctgccccggctggtcccccccggcaaaaagcctggcaccaaaaaaaccgcccaccgggcccctacctccctccaaggaaccactgaaggaaaaactgatcccaggaccattatcacccgtggcacgcggggggtctaatggaggctccaatgtgggtatggaagatggcgagcgaccacgccgaagacggcacggacgggctcagcaacaggacaagccaccacgattcagacgattgaagcaggagagggagaatgcagctcgcggatccgaaggcaaaccttccctgaccttgcccgccagtgcgcccgggcccgaagaggcccttacgactgtgaccgtcgcccctgccccgagacgtgccgcagcaaaatcaccagacctgtccaatcagaatagcgaccaggccaacgaggagtgggagacggcctccgaatcgtctgacttcacttctgagcgacgcggggacaaggaggcccctccccccgttctcctgacaccaaaggccgtgggaacacctggcggcggaggaggcggggccgtgccaggcatctctgcaatgagccgtggcgacctgtcacaacgtgccaaggacttatcaaaaaggagcttctctagtcagcggcctggcatggagaggcagaaccgcaggcctggtcctggaggaaaggccggttcttctggctcgtcttcaggtggtggaggaggtggacctggtggcagaaccggtccgggccgtggagacaagaggagctggcctagtcctaagaaccgcagccggcctccggaggagagaccaccaggcctgccactgccacctcccccaccatcctcgagcgctgtgttcaggctggaccaggttatacactctaacccagctggcatccagcaggctctggcccagctcagttcccggcagggctcagttaccgctcctggtggacacccgagacacaagccaggccctccccaggccccccagggcccatcgcccagaccgccgacccggtatgaaccacagcgtgtaaactcaggactatccagtgatccacacttcgaagagcccggtcccatggtacgcggagttggtggaacgccccgggattctgctggagtgagtcccttccctcctaagcggcgcgagcgcccaccacgaaagcctgaactgctgcaggaggagagcttgccacccccccacagttccggctttctggggtccaagcccgaggggcccggaccccaggccgagtctcgggacaccggaacagaggctttgacaccccacatttggaacagactgcatactgccacgtctcgcaagagctatagaccaagctctatggaaccctggatggaacccttgagcccgttcgaggacgtcgcaggcactgagatgagccagtccgactccggagtggatctctccggggatagtcaggtgagcagcgggccctgctctcagagaagctcaccggacgggggactgaaaggtgccgccgagggaccaccaaagcggcctgggggtagttcccctcttaacgccgtgccttgcgaaggcccccccggttctgagccacctcgccgaccaccccctgctccgcatgatggtgacaggaaagagctgcccagggagcagcctctcccacccggacctataggcactgagcgctcacagcgaactgataggggcactgaaccaggtcccatccggcctagccatcgacctggccctcccgtgcagttcgggacgtcggacaaggactctgatctaagactcgtggtcggggatagcttgaaagccgagaaagaactaacagccagtgtaactgaggcgatacccgtgagtcgcgactgggagctgctgccaagtgctgctgctagtgctgagccacaatcaaagaatctggattctggtcactgcgtccccgagcccagctcctccggccaacgactctacccggaagtgttttatggctccgcaggccccagtagcagccagatcagcggcggccacggcttgagcatcacctcgaaacaatggcgaagaccagggaccccctctcttcacccctatcgatcccagcccctgtacctcccaccaggacccgcgccaccgagcgcacttttatccggtgtcgcactgaaggggcagttcctagatttcagcacaatgcaggcaacggagttaggaaaactaccagccggcggcgtcttatatccacctccgtcctttctctattctcccgccttttgtcccagccccttacccgacacttcccttctgcaggtaagacaagatctcccttctccatcggacttttacagcaccccacttcagccaggcggccagagcggctttctgccctccggggccccagcccagcaaatgttgcttccaatggtggatagccagcttcctgtggtgaatttcggtagccttcccccagctccccctccagcacctcccccactctctcttctgcccgtggggcccgcactgcaacctccctccctggctgtgagaccaccccccgccccagcaacaagggtattgccttcaccagcacgccctttccctgctagcttaggtagagctgaattacatcctgtggagctgaagccgttccaagattaccaaaagctgtctagtaacctcggcgggcctgggtcctcacggactcctcccaccggcaggagcttctccggcctgaattcaagactgaaggcaactccttccacttactcaggcgtgttccggactcaacgcgttgatctctatcaacaagccagcccgcctgatgcactccggtggatacccaagccttgggaacggaccggccctcctccaagagagggaccgagccgaagggccgaggaacccggttctagaggtgacaaggagcccgggctacctccaccccggtag

SEQ ID NO: 345121 - DNA, 6450 bp, Artificial Sequence
  derived and/or modified sequence
atgagtgaccgcagcgggcctacagccaagggtaaggacggcaagaaatattcttctttaaatttgtttgatacctacaaaggcaagtccctggagatccagaagccggctgtggcaccccgacatggactgcaaagcttaggtaaagtcgctatcgctcgccggatgccgccaccggccaacctgccctcactgaaggccgaaaacaagggtaatgacccaaatgtgagcttggtccctaaagatggcaccgggtgggcatccaagcaagaacagtccgacccaaagagttcagacgcatcaacagcccagccactggagagccaaccccttccagcctctcagactcccgcttctaatcagcccaagcgcccaccagctgctccagagaacaccccactcgtgccctccggtgtcaagtcctgggcacaggccagcgtgactcacggggctcatggcgatggaggtagggcctcaagcttacttagccgcttttccagggaagagttcccaacactgcaggctgccggtgaccaagataaggcagccaaggagcgggagtctgcagagcagtcatccggacccggcccatccttacgacctcagaatagcacaacctggagggacggtggaggacgagggccagacgagttagaaggccccgactcaaaacttcaccatgggcacgacccacgcgggggtctccagccatctggccctccacagttcccgccgtacagggggatgatgccacctttcatgtacccaccgtacctgccattccctccaccatacgggcctcaggggccttataggtaccccacccctgacggaccttctaggttcccacgggttgctggcccccggggctctggccctcctatgaggctagtcgagcccgttggtagaccgagcattctcaaggaagataatttgaaagagtttgatcagttagaccaggagaacgacgatggctgggccggtgcccacgaagaggttgactatacggagaaattgaaattttccgatgaggaggacggccgcgatagcgacgaggaaggggccgagggccatagagattcacaatcagctagtggggaggagaggcctcccgaagccgatggaaagaagggaaacagtcccaacagtgaacctcccaccccaaaaactgcctgggctgagacctcaaggccccctgaaactgagcctgggcccccggcccccaagcccccactcccaccgccacatagaggccccgccggaaattgggggcctcccggagactaccccgatcggggcgggcccccgtgcaagcctcccgcccctgaagacgaggatgaggcctggagacagcgccgcaagcagagcagtagcgaaatttctctggcagtggaacgggcacgtcggcgtagagaggaagaggagcgtcggatgcaggaagagcgacgcgcagcctgtgctgagaaattgaaacgcctcgatgaaaaattcggagcacccgataagcgcctgaaggccgagcccgctgcgccacccgctgcgccctccacccctgccccgccgccagcagtgcctaaagagctgcccgccccccctgctcctcctcccgcgtccgccccaactcctgaaaaggagccagaggagcccgcacaggctccccccgcacagtccacaccaacaccgggagtcgccgcggcacccacactagtatccggtgggggaagtacctcatccacttcctcaggctcatttgaagcaagccctgtggagccacaactgccaagtaaggagggcccagaacccccagaagaggtgcctccaccgactacacctccagttcccaaagtggagcccaaaggtgatgggattggaccaacaagacaacccccgagtcagggtcttggctacccgaagtaccagaaatccctgccacctaggtttcaaaggcaacaacaggaacagctgcttaaacagcagcagcagcatcagtggcagcagcaccaacagggtagcgccccacctacccctgtgcctcctagcccccctcagcctgtcaccctaggggcagtgccggcaccccaggcccctcccccacctcctaaagccctgtatcctggagcacttggtcgcccaccccctatgccgccgatgaatttcgaccctagatggatgatgatacccccttatgttgacccccgcctgctccagggacgccctcctctcgacttctatcccccaggagtgcatccatccggattggtccccagggagcgctctgactccgggggctcctcatccgagccgttcgatcgccacgccccagccatgctcagagaaagaggaactcctcccgtggatcctaaacttgcctgggtaggcgacgtctttacagctacccccgctgagcctcgcccgttgacgtcacctttgaggcaggccgcagacgaggatgataaggggatgcgatccgagactcctccagtgccccctccccccccttacctggcaagctatccagggttccctgaaaacggggcccccggaccccctatctcacggttccctttggaggaacccggtccacggcccctgccttggccacccgggagcgacgaagtggcaaagatccagacccccccgcctaaaaaggagcctcccaaggaggagaccgcccagctaaccggcccagaagctggccgtaagcccgcccggggagttggcagcggcggccagggcccccctccacctagaagagagtcgcgcacagagactcggtggggtccacgccctggatctagtcgaagggggatccccccggaggaacctggcgcaccacctaggagggccggacctataaaaaagcctcctcccccaaccaaagtggaagagctcccacctaagcctttagagcaaggagatgagacacccaaacctccgaagcctgaccctctcaagatcacaaaggggaaactgggaggtcccaaggagacgcccccaaacggtaacttatcccccgcacctcggctgcggagggactacagttacgagagagtaggacccacatcctgcaggggcaggggtaggggggaatatttcgccagaggccgcggcttccgcggcacttatggaggaaggggtcggggagcagcgggaaattcggccgtcactgaatcatttgaagaaatgatgggggttgaagtgggacagggtgaccagacaactctcctgcttccagaggccgcacttcccgcgcgacacggggcccgggtccagagcatgcgaaaaagccccagcggggccgggagcggggcgcagaaacaggccgcccggcccatgagagtgatttggttattacagacacggcgactccctcatcctaggcgagagcactcgccaagatcacgatcacccactacccgcagcccgacctttcccgccccagctcgcttcacaccaggtgtgggcgagagctccctgcccgaaggaatttctccagggccccgccgccgtgaacctccccaggtgtgtccagggtggtctcctcccgccaagtctctcgccccaaaaaagccacccaccgggcccttgccaccatcgaaagagcccctgaaggagaagcttatcccagggcccttgagtccagtggctagagggggatcaaatggaggtagtaacgtggggatggaggacggcgagcgcccccgccgccgcaggcacggcagggcccagcagcaggacaaaccgccccgctttcgcagattaaagcaagagcgggagaacgcagcgcgtggttcggaagggaaaccttctctcaccctgcctgccagcgcaccaggaccagaagaggcgctgacgaccgtaacggtcgcacctgctcctcggagggctgctgccaagtctcctgacctaagcaaccagaattccgaccaggcgaatgaggagtgggagactgcaagcgaatcatctgacttcacatctgaacggcggggtgacaaggaggctcccccaccggttctgttgacaccaaaagcagtgggaacacctggcgggggtgggggtggcgccgtccccgggatcagcgcgatgtccaggggggacttgtcacagcgagccaaagatctctccaagcgatcatttagcagtcagcgacccggaatggaacgccaaaatcgacgacctggccctggcggtaaagccggaagttccggaagcagcagcggtggaggaggcgggggcccaggaggtcgtaccggcccaggtcggggcgacaagcgctcatggccatcccctaagaatcgtagtcgaccacccgaggaacggcctccaggactgccactgcccccccctcctccttccagcagcgccgtgtttcgtctggatcaagttatccactctaaccccgctgggatacagcaggccctggcccagctaagtagcaggcagggaagcgttaccgctcccggtggacacccgcgccataaaccaggccccccccaagcgccccagggcccatcaccacgcccccccacacggtatgagcctcagagggtcaattccggtctgagtagtgatcctcacttcgaggagcctggacccatggtcagaggagtaggaggcactccacgcgacagcgctggcgtgtcgcccttcccgcctaaaaggagggaacgtcccccgaggaaacccgaattgctccaggaagagtcgcttcccccaccacactcttccggcttcctggggtccaagcccgagggccccgggccccaggctgagagcagggacacaggcacagaggctctgacccctcatatctggaatagactccacacagcaacaagccgtaagagctaccggccaagcagcatggaaccgtggatggaacctctcagccctttcgaggacgtcgctggaactgagatgtcacagtccgacagcggagtggacctgagcggtgactcacaggtgagttccggcccctgctcacagcgttcatcccccgatggcgggctgaagggtgcagctgaggggccaccgaagaggccaggtggatcctcccctctgaacgccgtcccatgtgagggccctcccggatctgagccccctaggcggcctcctcccgccccacacgatggtgacagaaaagagctccctcgggagcagccactgcctcctgggcccattggcacggagagaagtcagcgcaccgacagaggaaccgaacccgggccgatccgcccaagtcacagaccgggcccgccggttcaattcggaacaagcgacaaggatagcgacctgcggttagttgttggggactccttgaaggccgaaaaggagctcaccgcttccgtcactgaagcaatcccagtctctcgggactgggaattactgccctccgccgctgcgtcagccgaaccacagagcaagaacctggatagcggacactgcgtgcccgagcctagtagcagcggccaacgcctttaccctgaagtgttttatggctctgcggggcctagctcttctcaaatttctggggggcatggcttgagcatcacttccaagcagtggagaaggccaggtactccctcactccacccctacagaagccaacccctttatctgccccccggtcccgccccaccctctgccttgttgagcggggttgcacttaagggccagtttttagattttagtaccatgcaggccacagagctgggtaagctgccagctggcggggtcctgtacccccctccaagttttttgtacagcccagcattttgcccctcccccttgcccgatacctcactgctgcaggtcagacaggacctcccaagtcccagcgatttttattctacacctttgcagcctggagggcagtccgggttcctcccctccggtgcgcctgcccaacagatgttactgccaatggtggattcccagctgccagtcgtgaactttggcagcctacctcctgctcctccgccggcccctccaccattaagtctcctgccagtcgggcccgcacttcagccaccatcactcgcagtgaggccgcctccagcgccagctaccagagtgctgccttcgccagctaggccttttccagcatctctcggtagggcagagttgcaccctgtggagttgaaaccattccaggattaccagaagctgtctagtaatctgggaggcccagggtcatccaggaccccaccaactggccggtctttttccggattaaacagccgtctgaaggccaccccgtccacttacagcggcgtgtttagaactcagcgcgtcgacctgtaccagcaggcaagcccacccgatgcactcaggtggatcccaaaaccctgggagaggactggcccccccccaagagaggggcctagccgccgagctgaagaacctggcagccgcggcgacaaggaacccggcctgccccccccgaggtag

SEQ ID NO: 345122 - DNA, 4149 bp, Artificial Sequence
  derived and/or modified sequence
atgctgagagagcgcgggacaccaccagttgatccaaaactcgcttgggttggagatgtcttcacagccacaccagcagagccaaggccattgacttcaccactgcgtcaggcagctgatgaggatgataaaggcatgaggtctgagacaccaccagttccacccccccctccgtatctggccagctacccaggctttcccgagaacggcgcacccggccccccaattagccgcttccccctcgaagagcctggcccccgtcctttaccctggcctcctgggtcagacgaagtggccaagatccagactccgccgcccaaaaaagaacctccaaaagaggagaccgctcagctgaccgggcccgaggccgggagaaaaccggcaaggggagtgggctctgggggacagggacccccacctccgcgccgcgagagcagaaccgagacccgatggggacccagaccaggatctagccgtagaggcattccacctgaagagcctggtgcccctccacggcgagccggaccaattaaaaaaccaccaccccctaccaaagtggaagagctcccccccaaaccactggagcaaggcgatgagacccctaagccacccaaacccgaccctctgaaaattacaaaaggaaagctgggcggacccaaagaaacacctcctaacggcaacctctctcccgctcccagactgaggcgagactactcctacgagcgcgtcggccccactagttgccgcggaagaggtcgcggcgagtatttcgcacgcgggcggggttttcgagggacatatggcggcaggggcagaggcgctcggtcccgcgagttccggtcttatagagaattccgtggggatgatgggagaggcggaggaaccggggggcccaaccaccctcctgccccacggggccggacagcatcagagacgagatcagagggtagtgaatatgaggagataccaaaaaggcggaggcagcggggcagtgagactggctccgaaacacacgaatcagacctggccccctcggataaggaagcccccactccgaaagaaggcactctaacccaggtccccctggccccccccccacccggtgccccacctagcccagctcccgctcggtttactgcccggggcggcagagttttcacaccgaggggcgtgccctcacgtcggggccggggtggcggacgaccccctccgcaagtgtgccctgggtggagtccacccgccaagtccctggcccctaagaaaccccccactggcccactcccccccagtaaggagcctctgaaagagaaactgatcccaggaccactaagcccggtggccagaggaggcagcaacggcggatcaaacgtgggcatggaggacggggaaaggccacgaagaaggcgacacggccgggcgcagcagcaggacaaacctcctcgcttccgccggctgaaacaggaacgcgagaatgccgctcgtggatctgaaggaaagccgtccctgaccctgcccgcaagcgcacccggccctgaggaagccctcacaaccgtgacggtagctcccgctccccgacgggctgctgcaaagtcgcctgatttgtctaaccaaaattccgaccaagccaacgaagagtgggagactgcaagcgagtcctccgactttacatcagaacggcgaggcgataaagaggcacctccccctgtgctgctgactccaaaggcagtgggaacccccggtggaggcggaggcggggccgtgccaggaatttcagccatgtccagaggggaccttagtcagcgggccaaggatctgtcaaaacgcagcttttcctctcaaaggcctgggatggagagacagaacagaaggcctggaccaggaggcaaagctggtagtagcgggtcgtctagcgggggcggcggggggggacccgggggcagaactggtccaggcaggggagacaaaaggagctggccttcacccaagaatcgaagccgaccacccgaagagcgccccccaggactccctttacctcctccccctcccagctcttctgctgtgttccgcctcgaccaggtgatacatagcaaccctgccggtatccagcaagcactggctcagctgagctcacggcaaggatctgttacggcccccggggggcacccaagacacaaacccgggccaccccaggcgccacagggaccctccccccgcccccccacaagatatgaaccacaacgagtgaatagcggcctgagctcagatcctcatttcgaggaacctgggcctatggtgcgcggcgtggggggcacaccacgtgacagtgccggtgtcagcccgtttccgccaaaaaggagggagcgcccgccacgtaagcctgaactgttgcaggaggaatctctgccccccccacattcatcaggattcctcgggtccaagcccgaagggcctgggccccaggcagaaagccgagacaccggtaccgaggccttgacgccgcacatctggaatcggttacacacagccacttcccgaaaatcttatagaccaagctccatggaaccctggatggaaccccttagtccctttgaggatgtggcaggaaccgaaatgagccagtctgattctggggtggatttaagtggggattctcaggtgtcatcaggaccttgctcacagaggtccagccccgatggcggtctcaagggggctgccgaaggaccccctaaacgccctggtggctcttcacctctgaacgctgtgccatgcgagggccctcccggtagcgaaccaccccgcaggcctcctcctgcaccccatgacggtgaccgcaaggaattaccacgagagcagcctctgccacccggcccaattggcacagaaagaagtcagaggaccgacaggggcaccgaacctggccccattaggccttcacatagaccgggccctccggtccagtttggtacctcagataaggactccgaccttcgcctcgtagtgggcgactcactgaaggccgaaaaggagctgacagcctccgtgactgaagctatcccagtgtcacgggactgggaacttctaccaagtgcggccgcatccgcggagccccagtccaagaaccttgattcagggcattgcgttccggaacctagctcttctggacagcggctttaccctgaggtattttacggctcagccggaccgagcagttcccagatctccggcggagccatggattcccagctgcatccaaactcaggagggttccgccctggaactccttctctgcatccttataggagccagcccctctacctgcctccgggccctgctcctccctcggcccttttgagcggtgtcgcccttaaggggcaattcctggacttttccaccatgcaagcaaccgaactgggaaaacttccagcagggggcgtcctgtatcctccaccgtcattcctctactcgcctgccttctgcccgagcccgcttcctgatacctctttattgcaagtgcgccaggatctccccagcccatctgatttctactccacccctctgcagcccggaggacagagcggcttcttgccctccggggcccctgctcaacaaatgttgcttcccatggttgattcccagctgcctgtcgtgaactttgggagcctcccacccgctccccctcctgcaccaccccctctctctcttctcccggtcggccccgccctacaacctccctcccttgctgtcagacccccaccagctccggccaccagagtgttgccaagccccgctcgcccatttccagcctctctcggaagggccgaacttcatcccgtggagctgaaaccgttccaggattaccaaaagctctcaagcaacctcggggggccagggagtagccgcacacctcccacgggccgtagcttttcaggcttgaattcccggttgaaggccacgccttcgacttactccggtgtgtttcgaactcaacgggtggatctataccagcaggcctctcctccggacgccctcaggtggattccgaaaccatgggaacggactggacctcctccccgcgaaggacccagtcggcgagccgaggagcccgggagtaggggggacaaggagcctggtttgcctcccccccgctag

SEQ ID NO: 345123 - DNA, 4149 bp, Artificial Sequence
  derived and/or modified sequence
atgcttcgagaaaggggcactccccctgtcgatccaaagttagcttgggtgggggacgtgtttactgctacacccgctgagccccgccctttaacaagtcctctaaggcaggccgccgacgaagatgacaaggggatgcgttcagagactccccccgtgcctcccccacctccttacttggcctcttaccccggctttcctgaaaatggagcaccagggccgcctatcagtcggtttcccctcgaagaacccggaccccgccccctgccttggccacccggcagtgacgaagtggccaagatccagacccccccgccgaagaaagagcctcctaaggaggagacagcccaactgacaggtccagaagccggacggaagccagccagaggcgtgggctcaggcggacagggccctccccctccgaggagagagtcacggacggaaactcgctggggccctcgccccgggtcaagcaggcgcggtattcctcccgaagagcccggagcgccgcctcggcgggcgggccctatcaagaagccacccccacccacaaaggtggaggagctaccaccaaaaccccttgaacagggcgacgagacacctaagcccccaaagccagatcctttgaagatcaccaagggaaagctgggcgggccaaaggaaacccctccaaatgggaatctctcccccgctcctaggctcagacgcgattacagctatgagagggtgggccccacctcctgtcgaggcagggggaggggcgagtacttcgcccggggcagggggtttcggggaacctacggtggacggggacgcggcgctagatcaagagaattcaggtcataccgagagttcaggggcgatgatggtaggggcggcgggaccgggggcccgaatcatccccccgccccccggggcaggacagcctctgaaactagaagtgaaggcagcgagtatgaagagatccccaagcggcggcgccagcggggaagcgagactggaagcgagactcacgagtctgacctggcaccttctgataaagaggccccaactccgaaggaaggcactctgacacaagtccctttggcccccccaccacctggagccccaccttcgccagcccctgcacgctttactgcccgtggcggtagagttttcacccccagaggggtgccatcacggcgcggcagaggcggcggaagaccccctccacaagtttgccccggatggtctcccccagccaagagcttggctccaaagaagccaccaactggccctttgcccccgtccaaggaaccattgaaagagaagcttatccccggaccactgtcacctgtggctaggggcggatcaaacggcggatcaaatgtaggcatggaagacggcgaaaggccgcgcaggcgcaggcatggaagggcccagcagcaagacaagccccctagatttcgacgtctgaaacaagaaagagaaaacgcggcgcgtggttcagaggggaaaccaagcctgacactgccagccagcgcgccgggacctgaagaggccctcaccactgtgacagtagctcccgcacccaggagggctgccgcgaagtcccccgatctcagtaatcagaatagcgatcaggccaacgaggagtgggagaccgcgagcgagagtagtgactttaccagtgaaaggagaggcgataaagaggcacctccgcctgtcttactcactccaaaggccgttggtactcctgggggagggggtggcggggctgtgccaggcattagtgctatgtctaggggcgatttgagccagcgtgccaaagacctttcaaagaggtcattcagttctcagagaccagggatggagagacaaaatcgacgacccggacctggaggtaaggcaggaagcagtggcagcagctctgggggaggcggtggagggcctggggggcgtacggggcccggtcggggcgacaagcgctcatggcccagtcccaaaaacagatcgcgccccccagaggaaaggccgcccgggctgccactgccacccccccctccgtcttcctctgccgtgttccgactggaccaggtgatccactccaatcctgcggggatccagcaagctctggcccagctcagctctcgccaaggatccgtgaccgctcccggcggacacccccgccataagcccgggccacctcaggcgccgcagggaccatcacctcgacctcctacccgttacgaacctcagcgcgtgaacagcgggctctcatccgacccccactttgaagaaccgggccccatggtgagaggagtgggaggaaccccccgagacagtgctggggtgagccctttccctccaaaacgccgggaaagacctcctcgaaagcccgagttactccaagaagagtccctcccccctcctcactcttctggatttttgggctctaaacctgaagggcctggaccccaggctgaaagtagggatacaggtaccgaggccctcacaccacatatttggaatcgtttacacacagccactagccggaagtcataccggcctagctcaatggaaccttggatggagccacttagccctttcgaggacgtggcagggacagaaatgagccaaagtgattccggcgtcgacctctcaggggatagtcaagtgtcctcagggccctgctcccagaggtcctctcctgacggaggcttaaaaggcgccgccgagggtcctcctaagaggcctggcggaagttccccacttaatgccgtgccttgcgaaggaccccccgggtcggaacctcccaggcgccctccgccagctcctcatgatggtgaccggaaggaattgccccgcgaacagcccctcccaccagggcccatagggactgaaaggtcccagagaaccgaccgcggcactgagcctggtcccattagaccaagtcaccggccgggcccacccgtccagttcggaacgagcgacaaagattccgatctacggctggtggtgggtgacagcttaaaagcagagaaagagcttacagccagcgtgaccgaggccattcctgtgagccgggactgggagctactgccttctgcggctgcgtccgccgagccacagtcgaaaaacctagattctggccattgtgtgcccgagccatctagttctggacagaggttgtatccagaagtgttctacggctctgccggcccctcctcgtcacagattagtggcggagcgatggattctcagttacatcctaacagcggcggattcagacctggaactccttctctacacccctatcggagtcagccactgtatctgcctcccgggccagcccctcctagcgccttactgtccggggtggcgctgaaaggacaatttttagatttttctacaatgcaggctacggagttgggaaaactgcctgctggaggagtactgtaccccccaccatccttcctttactcacccgcattctgtccctcccccttacccgacacctctctgcttcaggttcgccaggatctgcctagcccttcggacttctactctacacctctgcagccgggggggcagagtggatttttaccatcgggcgcgcctgcacagcaaatgctgctgcccatggtggattctcagctgcccgtggtcaatttcggaagcttgccccctgctcctccccctgccccccctcctctgtctcttcttcccgtggggccagccctccaacctccttcccttgcagtgaggccccccccagcgccagcgactcgagtgctccccagccccgcaaggccgtttcccgcaagcttgggccgcgctgagctgcatccagtggaactgaagcctttccaggactaccagaagctgtcgagcaacctcggcggacctgggtcaagccgcactcctccaacagggagaagtttttcagggctgaacagccggctgaaggccaccccctccacttatagcggcgtgttccggactcaaagagtggacctgtaccagcaggcttctcctcccgatgcactgaggtggatccccaaaccctgggaacgcaccgggcccccaccccgggaaggaccaagcaggcgagcagaagaaccaggctcacgcggcgacaaggagccaggtctgccccctccaagatag

SEQ ID NO: 345124 - DNA, 6474 bp, Artificial Sequence
  derived and/or modified sequence
atgtctgacagaagtggccccacagccaagggcaaggatggcaagaagtacagcagcctgaacctgtttgacacctacaagggcaagagcctggagatccagaagccagctgtggcccccaggcatggcctgcagagcctgggcaaggtggccatcgcccggaggatgcctcctccagccaacctgcccagcctgaaggccgagaacaagggaaatgaccccaacgtgtccctggtgcccaaggatggcaccggctgggccagcaagcaggagcagagcgaccccaagagcagtgatgccagcacagcccagcccctggagagccagcccctgcctgccagccagaccccagccagcaaccagcccaagaggcctcctgctgcccctgagaacacccccctggtgcccagcggcgtgaagtcctgggcccaggcctctgtgacccatggagcccatggagatggcggccgggccagcagcctgctgagccgcttcagccgggaggagttccccaccctgcaggccgccggggaccaggacaaggccgccaaggagcgggagagcgctgagcagagcagcggccctggccccagcctgcggccccagaacagcaccacctggagagatggcggcggccggggcccagatgagctggagggccctgacagcaagctgcaccacggccatgacccccggggcggcctgcagcccagcggccccccccagttccccccctaccggggcatgatgccacccttcatgtacccaccctacctgcccttccccccaccctacggcccccagggcccctaccgctaccccaccccagatggccccagccgcttcccccgggtggccggcccccggggcagcggcccccccatgaggctggtggagcctgtgggccggcccagcatcctgaaggaggacaacctgaaggagtttgaccagctggaccaggagaatgatgatggctgggccggggcccacgaggaggtggactacacagagaagctgaagttcagtgatgaagaagatggccgggacagtgatgaggagggcgctgagggccaccgggacagccagagcgccagcggggaggagcggcccccagaggctgatggcaagaagggcaacagccccaacagcgagccccccacccccaagacagcctgggccgagaccagccggcccccagagacagagcccggccccccagcccccaagccacccctgcccccaccccaccggggccctgctggcaactggggccccccaggggactacccagacagaggaggccccccctgcaagcccccagccccagaagatgaagatgaggcctggaggcagaggaggaagcagagcagcagcgagatcagcctggccgtggagcgggccaggagaagaagagaggaggaggagaggaggatgcaggaggagcggcgggccgcctgtgccgagaagctgaagaggctggatgagaagtttggagccccagacaagaggctgaaggccgagcctgctgcccctcctgctgcccccagcaccccagcccctcctcctgctgtgcccaaggagctgcctgcccccccagcccctcctccagccagcgcccccaccccagagaaggagcctgaggagcccgcccaggcccccccagcccagagcacccccaccccaggagtggccgccgcccccaccctggtgtctgggggcggcagcaccagcagcaccagcagcggcagctttgaggccagccctgtggagccccagctgcccagcaaggagggccctgagcccccagaggaggtgcccccacccaccaccccacctgtgcccaaggtggagcccaagggagatggcatcggccccacccggcagccccccagccagggcctgggctaccccaagtaccagaagagcctgcccccacgcttccagaggcagcagcaggagcagctgctgaagcagcagcagcagcaccagtggcagcagcaccagcagggcagcgccccacccacccctgtgccccccagccccccccagcctgtgaccctgggcgctgtgcctgccccccaggcccctcctcctccacccaaggccctgtacccaggggccctgggccggcccccacccatgccacccatgaactttgacccccgctggatgatgatccccccctacgtggacccccggctgctgcagggccggccccccctggacttctacccacctggggtgcaccccagcggcctggtgccccgggagaggagtgacagcggcggcagcagcagcgagccctttgacagacatgccccagccatgctgcgggagcggggcaccccacctgtggaccccaagctggcctgggtgggagatgtgttcaccgccaccccagctgagccccggcccctgaccagccccctgcggcaggccgcagatgaagatgacaagggcatgaggtctgagaccccacctgtgcccccacctccaccctacctggccagctacccaggcttcccagaaaatggagcccctggcccccccatcagccgcttccccctggaggagcccggcccccggcccctgccctggcccccaggcagtgatgaggtggccaagatccagaccccaccacccaagaaggagccccccaaggaggagacagcccagctgaccggccctgaggccggcaggaagccagcccggggcgtgggcagcggcggccagggccccccacctccaagaagagagagcaggacagagacccgctggggcccccggcccggcagcagccggcggggcatccccccagaggagcccggggcccccccaagaagagctggccccatcaagaagcccccaccacccaccaaggtggaggagctgccccccaagcccctggagcagggagatgagacccccaagccacccaagccagaccccctgaagatcaccaagggcaagctgggcggccccaaggagaccccacccaacggcaacctgagccctgccccccggctgcggcgggactacagctatgagcgggtgggccccaccagctgccggggccggggccgcggggagtactttgcccggggccggggcttccggggcacctacggcggccggggccgcggggcccggagccgggagttccgcagctaccgggagttcagaggagatgatggccggggcggcggcaccggcggccccaaccaccccccagccccccggggccgcacagccagcgagaccaggtctgagggctctgaatatgaggagatccccaagagaagacggcagaggggcagcgagaccggcagcgagacccatgaaagtgacctggcccccagcgacaaggaggcccccacccccaaggagggcaccctgacccaggtgcccctggcccctcctcctcctggggccccacccagccctgccccagcccgcttcaccgcccggggcggccgggtcttcaccccccggggcgtgcccagcagaagaggccggggcggcggccggcccccaccccaggtgtgccccggctggagccccccagccaagagcctggcccccaagaagcccccaacaggccccctgccccccagcaaggagcccctgaaggagaagctgatccctggccccctgagccctgtggcccggggcggcagcaatggaggcagcaatgtgggcatggaggatggagagcggcccaggagaagaagacatggccgggcccagcagcaggacaagccaccccgcttccggcggctgaagcaggagagagaaaatgctgcccggggcagcgagggcaagcccagcctgaccctgcctgccagcgcccctggccctgaggaggccctgaccaccgtgacagtggccccagccccccggcgggctgctgccaagagcccagacctgagcaaccagaacagcgaccaggccaatgaggagtgggagacagccagcgagagcagtgacttcaccagcgagcggcggggggacaaggaggcccctcctcctgtgctgctgacccccaaggctgtgggcacccctgggggcggcggcggcggcgctgtgcccggcatcagcgccatgagcagaggagacctgagccagagggccaaggacctgagcaagaggagcttcagcagccagaggcctggcatggagcggcagaacagaagacctggccctgggggcaaggccggcagcagcggcagcagcagcggcggcggcggcggcggccctgggggccgcactggacctggccgcggggacaagaggtcctggcccagccccaagaacagaagccggcccccagaggagaggcctcctggcctgcccctgcccccacctccacccagcagcagcgctgtgttccggctggaccaggtgatccacagcaacccagctggcatccagcaggccctggcccagctgagcagccggcagggctctgtgacagcccctgggggccaccccaggcacaagccaggccccccccaggccccccagggccccagcccccggccccccaccaggtatgagccccagagggtgaacagcggcctgagcagtgacccccactttgaggagcccggccccatggtgcggggcgtgggcggcaccccccgggacagcgctggggtgagccccttcccccccaagaggcgggagcggccccccaggaagccagagctgctgcaggaggagagcctgcccccaccccacagcagcggcttcctgggcagcaagccagagggccctggcccccaggccgagagccgggacacaggaacagaggccctgaccccccacatctggaaccggctgcacacagccaccagcaggaagagctaccggcccagctccatggagccctggatggagcccctgagcccctttgaagatgtggccggcacagagatgagccagagcgacagcggcgtggacctgagcggggacagccaggtgagcagcggcccctgcagccagaggagcagcccagatggcggcctgaagggagctgctgagggcccccccaagaggcctgggggcagcagccccctgaatgctgtgccctgtgagggccccccaggcagcgagcccccccggcggcccccaccagcccctcatgatggagacaggaaggagctgccccgggagcagcccctgcccccaggccccatcggcacagagaggagccagaggacagaccggggcacagagcccggccccatccggcccagccaccggcccggcccccctgtgcagtttggcaccagtgacaaggacagcgacctgcggctggtggtgggggacagcctgaaggccgagaaggagctgacagcctctgtgacagaggccatccctgtgtcccgggactgggagctgctgcccagcgctgctgccagcgctgagccccagagcaagaacctggacagcggccactgtgtgcctgagcccagcagcagcggccagaggctgtacccagaggtgttctacggcagcgctggccccagcagcagccagatctctggaggagccatggacagccagctgcaccccaacagcggcggcttccggcccggcacccccagcctgcacccctaccgcagccagcccctgtacctgcccccaggccctgcccctccttctgccctgctgtctggagtggccctgaagggccagttcctggacttcagcaccatgcaggccacagagctgggcaagctgcctgctggaggagtgctgtaccccccacccagcttcctgtacagccctgccttctgccccagccccctgcctgacaccagcctgctgcaggtgcggcaggacctgcccagccccagcgacttctacagcacccccctgcagcccggcggccagagcggcttcctgcccagcggggccccagcccagcagatgctgctgcccatggtggacagccagctgcctgtggtgaactttggcagcctgcccccagcccctcctccagcccccccacccctgagcctgctgcctgtgggccctgccctgcagccccccagcctggccgtgcggcccccaccagccccagccaccagggtgctgcccagccctgcccggcccttccctgccagcctgggccgggcagagctgcaccctgtggagctgaagcccttccaggactaccagaagctgagcagcaacctgggcggccctggcagcagcaggaccccacccaccggccgctccttcagcggcctgaacagccggctgaaggccacccccagcacctacagcggggtcttccgcacccagagggtggacctgtaccagcaggccagccccccagatgccctgcgctggatccccaagccctgggagaggacaggccccccaccccgggagggccccagccggcgggcagaggagcccggcagcagaggagacaaggagcccggcctgcccccaccaagatag

SEQ ID NO: 345125 - DNA, 6474 bp, Artificial Sequence
  derived and/or modified sequence
atgtctgacagaagtggccccacagccaagggcaaggatggcaagaagtacagcagcctgaacctgtttgacacctacaagggcaagagcctggagatccagaagccagctgtggcccccaggcatggcctgcagagcctgggcaaggtggccatcgcccggaggatgcctcctccagccaacctgcccagcctgaaggccgagaacaagggaaatgaccccaacgtgtccctggtgcccaaggatggcaccggctgggccagcaagcaggagcagagcgaccccaagagcagtgatgccagcacagcccagcccccagagagccagcccctgcctgccagccagaccccagccagcaaccagcccaagaggcctcctgctgcccctgagaacacccccctggtgcccagcggcgtgaagtcctgggcccaggcctctgtgacccatggagcccatggagatggcggccgggccagcagcctgctgagccgcttcagccgggaggagttccccaccctgcaggccgccggggaccaggacaaggccgccaaggagcgggagagcgctgagcagagcagcggccctggccccagcctgcggccccagaacagcaccacctggagagatggcggcggccggggcccagatgagctggagggccctgacagcaagctgcaccacggccatgacccccggggcggcctgcagcccagcggccccccccagttccccccctaccggggcatgatgccacccttcatgtacccaccctacctgcccttccccccaccctacggcccccagggcccctaccgctaccccaccccagatggccccagccgcttcccccgggtggccggcccccggggcagcggcccccccatgaggctggtggagcctgtgggccggcccagcatcctgaaggaggacaacctgaaggagtttgaccagctggaccaggagaatgatgatggctgggccggggcccacgaggaggtggactacacagagaagctgaagttcagtgatgaagaagatggccgggacagtgatgaggagggcgctgagggccaccgggacagccagagcgccagcggggaggagcggcccccagaggctgatggcaagaagggcaacagccccaacagcgagccccccacccccaagacagcctgggccgagaccagccggcccccagagacagagcccggccccccagcccccaagccacccctgcccccaccccaccggggccctgctggcaactggggccccccaggggactacccagacagaggaggccccccctgcaagcccccagccccagaagatgaagatgaggcctggaggcagaggaggaagcagagcagcagcgagatcagcctggccgtggagcgggccaggagaagaagagaggaggaggagaggaggatgcaggaggagcggcgggccgcctgtgccgagaagctgaagaggctggatgagaagtttggagccccagacaagaggctgaaggccgagcctgctgcccctcctgctgcccccagcaccccagcccctcctcctgctgtgcccaaggagctgcctgcccccccagcccctcctccagccagcgcccccaccccagagaaggagcctgaggagcccgcccaggcccccccagcccagagcacccccaccccaggagtggccgccgcccccaccctggtgtctgggggcggcagcaccagcagcaccagcagcggcagctttgaggccagccctgtggagccccagctgcccagcaaggagggccctgagcccccagaggaggtgcccccacccaccaccccacctgtgcccaaggtggagcccaagggagatggcatcggccccacccggcagccccccagccagggcctgggctaccccaagtaccagaagagcctgcccccacgcttccagaggcagcagcaggagcagctgctgaagcagcagcagcagcaccagtggcagcagcaccagcagggcagcgccccacccacccctgtgccccccagccccccccagcctgtgaccctgggcgctgtgcctgccccccaggcccctcctcctccacccaaggccctgtacccaggggccctgggccggcccccacccatgccacccatgaactttgacccccgctggatgatgatccccccctacgtggacccccggctgctgcagggccggccccccctggacttctacccacctggggtgcaccccagcggcctggtgccccgggagaggagtgacagcggcggcagcagcagcgagccctttgacagacatgccccagccatgctgcgggagcggggcaccccacctgtggaccccaagctggcctgggtgggagatgtgttcaccgccaccccagctgagccccggcccctgaccagccccctgcggcaggccgcagatgaagatgacaagggcatgaggtctgagaccccacctgtgcccccacctccaccctacctggccagctacccaggcttcccagaaaatggagcccctggcccccccatcagccgcttccccctggaggagcccggcccccggcccctgccctggcccccaggcagtgatgaggtggccaagatccagaccccaccacccaagaaggagccccccaaggaggagacagcccagctgaccggccctgaggccggcaggaagccagcccggggcgtgggcagcggcggccagggccccccacctccaagaagagagagcaggacagagacccgctggggcccccggcccggcagcagccggcggggcatccccccagaggagcccggggcccccccaagaagagctggccccatcaagaagcccccaccacccaccaaggtggaggagctgccccccaagcccctggagcagggagatgagacccccaagccacccaagccagaccccctgaagatcaccaagggcaagctgggcggccccaaggagaccccacccaacggcaacctgagccctgccccccggctgcggcgggactacagctatgagcgggtgggccccaccagctgccggggccggggccgcggggagtactttgcccggggccggggcttccggggcacctacggcggccggggccgcggggcccggagccgggagttccgcagctaccgggagttcagaggagatgatggccggggcggcggcaccggcggccccaaccaccccccagccccccggggccgcacagccagcgagaccaggtctgagggctctgaatatgaggagatccccaagagaagacggcagaggggcagcgagaccggcagcgagacccatgaaagtgacctggcccccagcgacaaggaggcccccacccccaaggagggcaccctgacccaggtgcccctggcccctcctcctcctggggccccacccagccctgccccagcccgcttcaccgcccggggcggccgggtcttcaccccccggggcgtgcccagcagaagaggccggggcggcggccggcccccaccccaggtgtgccccggctggagccccccagccaagagcctggcccccaagaagcccccaacaggccccctgccccccagcaaggagcccctgaaggagaagctgatccctggccccctgagccctgtggcccggggcggcagcaatggaggcagcaatgtgggcatggaggatggagagcggcccaggagaagaagacatggccgggcccagcagcaggacaagccaccccgcttccggcggctgaagcaggagagagaaaatgctgcccggggcagcgagggcaagcccagcctgaccctgcctgccagcgcccctggccctgaggaggccctgaccaccgtgacagtggccccagccccccggcgggctgctgccaagagcccagacctgagcaaccagaacagcgaccaggccaatgaggagtgggagacagccagcgagagcagtgacttcaccagcgagcggcggggggacaaggaggcccctcctcctgtgctgctgacccccaaggctgtgggcacccctgggggcggcggcggcggcgctgtgcccggcatcagcgccatgagcagaggagacctgagccagagggccaaggacctgagcaagaggagcttcagcagccagaggcctggcatggagcggcagaacagaagacctggccctgggggcaaggccggcagcagcggcagcagcagcggcggcggcggcggcggccctgggggccgcactggacctggccgcggggacaagaggtcctggcccagccccaagaacagaagccggcccccagaggagaggcctcctggcctgcccctgcccccacctccacccagcagcagcgctgtgttccggctggaccaggtgatccacagcaacccagctggcatccagcaggccctggcccagctgagcagccggcagggctctgtgacagcccctgggggccaccccaggcacaagccaggccccccccaggccccccagggccccagcccccggccccccaccaggtatgagccccagagggtgaacagcggcctgagcagtgacccccactttgaggagcccggccccatggtgcggggcgtgggcggcaccccccgggacagcgctggggtgagccccttcccccccaagaggcgggagcggccccccaggaagccagagctgctgcaggaggagagcctgcccccaccccacagcagcggcttcctgggcagcaagccagagggccctggcccccaggccgagagccgggacacaggaacagaggccctgaccccccacatctggaaccggctgcacacagccaccagcaggaagagctaccggcccagctccatggagccctggatggagcccctgagcccctttgaagatgtggccggcacagagatgagccagagcgacagcggcgtggacctgagcggggacagccaggtgagcagcggcccctgcagccagaggagcagcccagatggcggcctgaagggagctgctgagggcccccccaagaggcctgggggcagcagccccctgaatgctgtgccctgtgagggccccccaggcagcgagcccccccggcggcccccaccagcccctcatgatggagacaggaaggagctgccccgggagcagcccctgcccccaggccccatcggcacagagaggagccagaggacagaccggggcacagagcccggccccatccggcccagccaccggcccggcccccctgtgcagtttggcaccagtgacaaggacagcgacctgcggctggtggtgggggacagcctgaaggccgagaaggagctgacagcctctgtgacagaggccatccctgtgtcccgggactgggagctgctgcccagcgctgctgccagcgctgagccccagagcaagaacctggacagcggccactgtgtgcctgagcccagcagcagcggccagaggctgtacccagaggtgttctacggcagcgctggccccagcagcagccagatctctggaggagccatggacagccagctgcaccccaacagcggcggcttccggcccggcacccccagcctgcacccctaccgcagccagcccctgtacctgcccccaggccctgcccctccttctgccctgctgtctggagtggccctgaagggccagttcctggacttcagcaccatgcaggccacagagctgggcaagctgcctgctggaggagtgctgtaccccccacccagcttcctgtacagccctgccttctgccccagccccctgcctgacaccagcctgctgcaggtgcggcaggacctgcccagccccagcgacttctacagcacccccctgcagcccggcggccagagcggcttcctgcccagcggggccccagcccagcagatgctgctgcccatggtggacagccagctgcctgtggtgaactttggcagcctgcccccagcccctcctccagcccccccacccctgagcctgctgcctgtgggccctgccctgcagccccccagcctggccgtgcggcccccaccagccccagccaccagggtgctgcccagccctgcccggcccttccctgccagcctgggccgggcagagctgcaccctgtggagctgaagcccttccaggactaccagaagctgagcagcaacctgggcggccctggcagcagcaggaccccacccaccggccgctccttcagcggcctgaacagccggctgaaggccacccccagcacctacagcggggtcttccgcacccagagggtggacctgtaccagcaggccagccccccagatgccctgcgctggatccccaagccctgggagaggacaggccccccaccccgggagggccccagccggcgggcagaggagcccggcagcagaggagacaaggagcccggcctgcccccaccaagatag

SEQ ID NO: 345126 - DNA, 6417 bp, Artificial Sequence
  derived and/or modified sequence
atgtctgacagaagtggccccacagccaagggcaaggatggcaagaagtacagcagcctgaacctgtttgacacctacaagggcaagagcctggagatccagaagccagctgtggcccccaggcatggcctgcagagcctgggcaaggtggccatcgcccggaggatgcctcctccagccaacctgcccagcctgaaggccgagaacaagggaaatgaccccaacgtgtccctggtgcccaaggatggcaccggctgggccagcaagcaggagcagagcgaccccaagagcagtgatgccagcacagcccagcccctggagagccagcccctgcctgccagccagaccccagccagcaaccagcccaagaggcctcctgctgcccctgagaacacccccctggtgcccagcggcgtgaagtcctgggcccaggcctctgtgacccatggagcccatggagatggcggccgggccagcagcctgctgagccgcttcagccgggaggagttccccaccctgcaggccgccggggaccaggacaaggccgccaaggagcgggagagcgctgagcagagcagcggccctggccccagcctgcggccccagaacagcaccacctggagagatggcggcggccggggcccagatgagctggagggccctgacagcaagctgcaccacggccatgacccccggggcggcctgcagcccagcggccccccccagttccccccctaccggggcatgatgccacccttcatgtacccaccctacctgcccttccccccaccctacggcccccagggcccctaccgctaccccaccccagatggccccagccgcttcccccgggtggccggcccccggggcagcggcccccccatgaggctggtggagcctgtgggccggcccagcatcctgaaggaggacaacctgaaggagtttgaccagctggaccaggagaatgatgatggctgggccggggcccacgaggaggtggactacacagagaagctgaagttcagtgatgaagaagatggccgggacagtgatgaggagggcgctgagggccaccgggacagccagagcgccagcggggaggagcggcccccagaggctgatggcaagaagggcaacagccccaacagcgagccccccacccccaagacagcctgggccgagaccagccggcccccagagacagagcccggccccccagcccccaagccacccctgcccccacctggggactacccagaccggggcggccccccctgcaagcccccagccccagaagatgaagatgaggcctggaggcagaggaggaagcagagcagcagcgagatcagcctggccgtggagcgggccaggagaagaagagaggaggaggagaggaggatgcaggaggagaggagagctgcctgtgccgagaagctgaagaggctggatgagaagtttggagccccagacaagaggctgaaggccgagcctgctgcccccccagctgcccccagcaccccagcccctcctcctgctgtgcccaaggagctgcctgcccccccagcccctcctccagccagcgcccccaccccagagaaggagcctgaggagcccgcccaggcccccccagcccagagcacccccaccccaggagtggccgccgcccccaccctggtgtctgggggcggcagcaccagcagcaccagcagcggcagctttgaggccagccctgtggagccccagctgcccagcaaggagggccctgagcccccagaggaggtgcccccacccaccaccccacctgtgcccaaggtggagcccaagggagatggcatcggccccacccggcagccccccagccagggcctgggctaccccaagtaccagaagagcctgcccccacgcttccagaggcagcagcaggagcagctgctgaagcagcagcagcagcaccagtggcagcagcaccagcagggcagcgccccacccacccctgtgccccccagccccccccagcctgtgaccctgggcgctgtgcctgccccccaggcccctcctcctccacccaaggccctgtacccaggggccctgggccggcccccacccatgccacccatgaactttgacccccgctggatgatgatccccccctacgtggacccccggctgctgcagggccggccccccctggacttctacccacctggggtgcaccccagcggcctggtgccccgggagaggagtgacagcggcggcagcagcagcgagccctttgacagacatgccccagccatgctgcgggagcggggcaccccacctgtggaccccaagctggcctgggtgggagatgtgttcaccgccaccccagctgagccccggcccctgaccagccccctgcggcaggccgcagatgaagatgacaagggcatgaggtctgagaccccacctgtgcccccacctccaccctacctggccagctacccaggcttcccagaaaatggagcccctggcccccccatcagccgcttccccctggaggagcccggcccccggcccctgccctggcccccaggcagtgatgaggtggccaagatccagaccccaccacccaagaaggagccccccaaggaggagacagcccagctgactggacctgaggccggcaggaagccagcccggggcgtgggcagcggcggccagggccccccaccaccccggcgggagagcaggacagagacccgctggggccccaggcctggcagcagcagaagaggcatccccccagaggagcccggggccccaccccggcgggccggccccatcaagaagcccccaccacccaccaaggtggaggagctgccccccaagcccctggagcagggagatgagacccccaagccacccaagccagaccccctgaagatcaccaagggcaagctgggcggccccaaggagaccccaccaaatggaaacctgagccctgccccccggctgcggcgggactacagctatgaaagagtgggccccaccagctgccggggccggggccgcggggagtactttgcccggggccggggcttccggggcacctatggaggccggggccgcggggctgctggcaacagcgctgtgacagagagctttgaggagatgatgggcgtggaggtgggccagggcgaccagaccaccctgctgctgcctgaggccgccctgcctgcccggcatggagcccgggtgcagagcatgaggaagagccccagcggggccggcagcggggcccagaagcaggccgcccggcccatgagggtcatctggctgctgcagacccggcggctgccccacccccggcgggagcacagccccaggagccgcagccccaccaccaggagccccaccttccctgccccagcccgcttcaccccaggagtgggggagagcagcctgcctgagggcatcagccctggcccccggcggcgggagcccccccaggtgtgccccggctggagccccccagccaagagcctggcccccaagaagccacccaccggccccctgccccccagcaaggagcccctgaaggagaagctgatccctggccccctgagccctgtggcccggggcggcagcaatggaggcagcaatgtgggcatggaggatggagagcggcccaggagaagaagacatggccgggcccagcagcaggacaagcccccacgcttccggcggctgaagcaggagcgggagaatgctgcccggggcagcgagggcaagcccagcctgaccctgcctgccagcgcccctggccctgaggaggccctgaccaccgtgacagtggccccagcccccaggagagctgctgccaagagcccagacctgagcaaccagaacagcgaccaggccaatgaggagtgggagacagccagcgagagcagtgacttcaccagcgagaggagaggagacaaggaggcccctcctcctgtgctgctgacccccaaggctgtgggcaccccaggcggcggcggcggcggcgctgtgcccggcatcagcgccatgagcagaggagacctgagccagagggccaaggacctgagcaagaggagcttcagcagccagaggcctggcatggagcggcagaacagaagacctggccctgggggcaaggccggcagcagcggcagcagcagcggcggcggcggcggcggccctgggggccgcacaggccctggccgcggggacaagaggtcctggcccagccccaagaacagaagcaggcctcctgaggagcggcccccaggcctgcccctgcccccacctccacccagcagcagcgctgtgttccggctggaccaggtgatccacagcaacccagctggcatccagcaggccctggcccagctgagcagccggcagggctctgtgacagcccctgggggccaccccaggcacaagccaggccccccccaggccccccagggccccagccccaggcctcccaccaggtatgagccccagagggtgaacagcggcctgagcagtgacccccactttgaggagcccggccccatggtgcggggcgtgggcggcaccccccgggacagcgctggggtgagccccttcccccccaagagaagagagaggcctcccaggaagccagagctgctgcaggaggagagcctgcccccaccccacagcagcggcttcctgggcagcaagccagagggccctggcccccaggccgagagccgggacaccggcacagaggccctgaccccccacatctggaaccggctgcacacagccaccagcaggaagagctaccggcccagctccatggagccctggatggagcccctgagcccctttgaagatgtggccggcacagagatgagccagagcgacagcggcgtggacctgagcggggacagccaggtgagcagcggcccctgcagccagaggagcagcccagatggcggcctgaagggagctgctgagggcccccccaagaggcctgggggcagcagccccctgaatgctgtgccctgtgagggccccccaggcagcgagcccccaagaagacctcctccagcccctcatgatggagacaggaaggagctgccccgggagcagcccctgcccccaggccccatcggcacagagaggagccagaggacagaccggggcacagagcccggccccatccggcccagccacaggcctggcccccctgtgcagtttggcaccagtgacaaggacagcgacctgcggctggtggtgggggacagcctgaaggccgagaaggagctgacagcctctgtgacagaggccatccctgtgtcccgggactgggagctgctgcccagcgctgctgccagcgctgagccccagagcaagaacctggacagcggccactgtgtgcctgagcccagcagcagcggccagaggctgtacccagaggtgttctacggcagcgctggccccagcagcagccagatcagcggcggccacggcctgagcatcaccagcaagcagtggaggaggcctggcacccccagcctgcacccctaccgcagccagcccctgtacctgcccccaggccctgccccacccagcgccctgctgagcggcgtggccctgaagggccagttcctggacttcagcaccatgcaggccacagagctgggcaagctgcctgctgggggcgtgctgtacccacctccttccttcctgtacagccctgccttctgccccagccccctgcctgacaccagcctgctgcaggtgcggcaggacctgcccagccccagcgacttctacagcacccccctgcagcccggcggccagagcggcttcctgcccagcggggccccagcccagcagatgctgctgcccatggtggacagccagctgcctgtggtgaactttggcagcctgcccccagcccctcctccagcccccccacccctgagcctgctgcctgtgggccctgccctgcagccccccagcctggccgtgcggcccccaccagccccagccaccagggtgctgcccagccctgcccggcccttccctgccagcctgggccgggcagagctgcaccctgtggagctgaagcccttccaggactaccagaagctgagcagcaacctgggcggccctggcagcagcaggaccccacccaccggccgctccttcagcggcctgaacagccggctgaaggccacccccagcacctacagcggggtcttccgcacccagagggtggacctgtaccagcaggccagccccccagatgccctgcgctggatccccaagccctgggagaggactggacctccaccccgggagggccccagcagaagagctgaggagcccggcagcagaggagacaaggagcccggcctgcccccacccaggtag

SEQ ID NO: 345127 - DNA, 6417 bp, Artificial Sequence
  derived and/or modified sequence
atgtctgacagaagtggccccacagccaagggcaaggatggcaagaagtacagcagcctgaacctgtttgacacctacaagggcaagagcctggagatccagaagccagctgtggcccccaggcatggcctgcagagcctgggcaaggtggccatcgcccggaggatgcctcctccagccaacctgcccagcctgaaggccgagaacaagggaaatgaccccaacgtgtccctggtgcccaaggatggcaccggctgggccagcaagcaggagcagagcgaccccaagagcagtgatgccagcacagcccagcccccagagagccagcccctgcctgccagccagaccccagccagcaaccagcccaagaggcctcctgctgcccctgagaacacccccctggtgcccagcggcgtgaagtcctgggcccaggcctctgtgacccatggagcccatggagatggcggccgggccagcagcctgctgagccgcttcagccgggaggagttccccaccctgcaggccgccggggaccaggacaaggccgccaaggagcgggagagcgctgagcagagcagcggccctggccccagcctgcggccccagaacagcaccacctggagagatggcggcggccggggcccagatgagctggagggccctgacagcaagctgcaccacggccatgacccccggggcggcctgcagcccagcggccccccccagttccccccctaccggggcatgatgccacccttcatgtacccaccctacctgcccttccccccaccctacggcccccagggcccctaccgctaccccaccccagatggccccagccgcttcccccgggtggccggcccccggggcagcggcccccccatgaggctggtggagcctgtgggccggcccagcatcctgaaggaggacaacctgaaggagtttgaccagctggaccaggagaatgatgatggctgggccggggcccacgaggaggtggactacacagagaagctgaagttcagtgatgaagaagatggccgggacagtgatgaggagggcgctgagggccaccgggacagccagagcgccagcggggaggagcggcccccagaggctgatggcaagaagggcaacagccccaacagcgagccccccacccccaagacagcctgggccgagaccagccggcccccagagacagagcccggccccccagcccccaagccacccctgcccccacctggggactacccagaccggggcggccccccctgcaagcccccagccccagaagatgaagatgaggcctggaggcagaggaggaagcagagcagcagcgagatcagcctggccgtggagcgggccaggagaagaagagaggaggaggagaggaggatgcaggaggagaggagagctgcctgtgccgagaagctgaagaggctggatgagaagtttggagccccagacaagaggctgaaggccgagcctgctgcccccccagctgcccccagcaccccagcccctcctcctgctgtgcccaaggagctgcctgcccccccagcccctcctccagccagcgcccccaccccagagaaggagcctgaggagcccgcccaggcccccccagcccagagcacccccaccccaggagtggccgccgcccccaccctggtgtctgggggcggcagcaccagcagcaccagcagcggcagctttgaggccagccctgtggagccccagctgcccagcaaggagggccctgagcccccagaggaggtgcccccacccaccaccccacctgtgcccaaggtggagcccaagggagatggcatcggccccacccggcagccccccagccagggcctgggctaccccaagtaccagaagagcctgcccccacgcttccagaggcagcagcaggagcagctgctgaagcagcagcagcagcaccagtggcagcagcaccagcagggcagcgccccacccacccctgtgccccccagccccccccagcctgtgaccctgggcgctgtgcctgccccccaggcccctcctcctccacccaaggccctgtacccaggggccctgggccggcccccacccatgccacccatgaactttgacccccgctggatgatgatccccccctacgtggacccccggctgctgcagggccggccccccctggacttctacccacctggggtgcaccccagcggcctggtgccccgggagaggagtgacagcggcggcagcagcagcgagccctttgacagacatgccccagccatgctgcgggagcggggcaccccacctgtggaccccaagctggcctgggtgggagatgtgttcaccgccaccccagctgagccccggcccctgaccagccccctgcggcaggccgcagatgaagatgacaagggcatgaggtctgagaccccacctgtgcccccacctccaccctacctggccagctacccaggcttcccagaaaatggagcccctggcccccccatcagccgcttccccctggaggagcccggcccccggcccctgccctggcccccaggcagtgatgaggtggccaagatccagaccccaccacccaagaaggagccccccaaggaggagacagcccagctgactggacctgaggccggcaggaagccagcccggggcgtgggcagcggcggccagggccccccaccaccccggcgggagagcaggacagagacccgctggggccccaggcctggcagcagcagaagaggcatccccccagaggagcccggggccccaccccggcgggccggccccatcaagaagcccccaccacccaccaaggtggaggagctgccccccaagcccctggagcagggagatgagacccccaagccacccaagccagaccccctgaagatcaccaagggcaagctgggcggccccaaggagaccccaccaaatggaaacctgagccctgccccccggctgcggcgggactacagctatgaaagagtgggccccaccagctgccggggccggggccgcggggagtactttgcccggggccggggcttccggggcacctatggaggccggggccgcggggctgctggcaacagcgctgtgacagagagctttgaggagatgatgggcgtggaggtgggccagggcgaccagaccaccctgctgctgcctgaggccgccctgcctgcccggcatggagcccgggtgcagagcatgaggaagagccccagcggggccggcagcggggcccagaagcaggccgcccggcccatgagggtcatctggctgctgcagacccggcggctgccccacccccggcgggagcacagccccaggagccgcagccccaccaccaggagccccaccttccctgccccagcccgcttcaccccaggagtgggggagagcagcctgcctgagggcatcagccctggcccccggcggcgggagcccccccaggtgtgccccggctggagccccccagccaagagcctggcccccaagaagccacccaccggccccctgccccccagcaaggagcccctgaaggagaagctgatccctggccccctgagccctgtggcccggggcggcagcaatggaggcagcaatgtgggcatggaggatggagagcggcccaggagaagaagacatggccgggcccagcagcaggacaagcccccacgcttccggcggctgaagcaggagcgggagaatgctgcccggggcagcgagggcaagcccagcctgaccctgcctgccagcgcccctggccctgaggaggccctgaccaccgtgacagtggccccagcccccaggagagctgctgccaagagcccagacctgagcaaccagaacagcgaccaggccaatgaggagtgggagacagccagcgagagcagtgacttcaccagcgagaggagaggagacaaggaggcccctcctcctgtgctgctgacccccaaggctgtgggcaccccaggcggcggcggcggcggcgctgtgcccggcatcagcgccatgagcagaggagacctgagccagagggccaaggacctgagcaagaggagcttcagcagccagaggcctggcatggagcggcagaacagaagacctggccctgggggcaaggccggcagcagcggcagcagcagcggcggcggcggcggcggccctgggggccgcacaggccctggccgcggggacaagaggtcctggcccagccccaagaacagaagcaggcctcctgaggagcggcccccaggcctgcccctgcccccacctccacccagcagcagcgctgtgttccggctggaccaggtgatccacagcaacccagctggcatccagcaggccctggcccagctgagcagccggcagggctctgtgacagcccctgggggccaccccaggcacaagccaggccccccccaggccccccagggccccagccccaggcctcccaccaggtatgagccccagagggtgaacagcggcctgagcagtgacccccactttgaggagcccggccccatggtgcggggcgtgggcggcaccccccgggacagcgctggggtgagccccttcccccccaagagaagagagaggcctcccaggaagccagagctgctgcaggaggagagcctgcccccaccccacagcagcggcttcctgggcagcaagccagagggccctggcccccaggccgagagccgggacaccggcacagaggccctgaccccccacatctggaaccggctgcacacagccaccagcaggaagagctaccggcccagctccatggagccctggatggagcccctgagcccctttgaagatgtggccggcacagagatgagccagagcgacagcggcgtggacctgagcggggacagccaggtgagcagcggcccctgcagccagaggagcagcccagatggcggcctgaagggagctgctgagggcccccccaagaggcctgggggcagcagccccctgaatgctgtgccctgtgagggccccccaggcagcgagcccccaagaagacctcctccagcccctcatgatggagacaggaaggagctgccccgggagcagcccctgcccccaggccccatcggcacagagaggagccagaggacagaccggggcacagagcccggccccatccggcccagccacaggcctggcccccctgtgcagtttggcaccagtgacaaggacagcgacctgcggctggtggtgggggacagcctgaaggccgagaaggagctgacagcctctgtgacagaggccatccctgtgtcccgggactgggagctgctgcccagcgctgctgccagcgctgagccccagagcaagaacctggacagcggccactgtgtgcctgagcccagcagcagcggccagaggctgtacccagaggtgttctacggcagcgctggccccagcagcagccagatcagcggcggccacggcctgagcatcaccagcaagcagtggaggaggcctggcacccccagcctgcacccctaccgcagccagcccctgtacctgcccccaggccctgccccacccagcgccctgctgagcggcgtggccctgaagggccagttcctggacttcagcaccatgcaggccacagagctgggcaagctgcctgctgggggcgtgctgtacccacctccttccttcctgtacagccctgccttctgccccagccccctgcctgacaccagcctgctgcaggtgcggcaggacctgcccagccccagcgacttctacagcacccccctgcagcccggcggccagagcggcttcctgcccagcggggccccagcccagcagatgctgctgcccatggtggacagccagctgcctgtggtgaactttggcagcctgcccccagcccctcctccagcccccccacccctgagcctgctgcctgtgggccctgccctgcagccccccagcctggccgtgcggcccccaccagccccagccaccagggtgctgcccagccctgcccggcccttccctgccagcctgggccgggcagagctgcaccctgtggagctgaagcccttccaggactaccagaagctgagcagcaacctgggcggccctggcagcagcaggaccccacccaccggccgctccttcagcggcctgaacagccggctgaaggccacccccagcacctacagcggggtcttccgcacccagagggtggacctgtaccagcaggccagccccccagatgccctgcgctggatccccaagccctgggagaggactggacctccaccccgggagggccccagcagaagagctgaggagcccggcagcagaggagacaaggagcccggcctgcccccacccaggtag

SEQ ID NO: 345128 - DNA, 6450 bp, Artificial Sequence
  derived and/or modified sequence
atgtctgacagaagtggccccacagccaagggcaaggatggcaagaagtacagcagcctgaacctgtttgacacctacaagggcaagagcctggagatccagaagccagctgtggcccccaggcatggcctgcagagcctgggcaaggtggccatcgcccggaggatgcctcctccagccaacctgcccagcctgaaggccgagaacaagggaaatgaccccaacgtgtccctggtgcccaaggatggcaccggctgggccagcaagcaggagcagagcgaccccaagagcagtgatgccagcacagcccagcccccagagagccagcccctgcctgccagccagaccccagccagcaaccagcccaagaggcctcctgctgcccctgagaacacccccctggtgcccagcggcgtgaagtcctgggcccaggcctctgtgacccatggagcccatggagatggcggccgggccagcagcctgctgagccgcttcagccgggaggagttccccaccctgcaggccgccggggaccaggacaaggccgccaaggagcgggagagcgctgagcagagcagcggccctggccccagcctgcggccccagaacagcaccacctggagagatggcggcggccggggcccagatgagctggagggccctgacagcaagctgcaccacggccatgacccccggggcggcctgcagcccagcggccccccccagttccccccctaccggggcatgatgccacccttcatgtacccaccctacctgcccttccccccaccctacggcccccagggcccctaccgctaccccaccccagatggccccagccgcttcccccgggtggccggcccccggggcagcggcccccccatgaggctggtggagcctgtgggccggcccagcatcctgaaggaggacaacctgaaggagtttgaccagctggaccaggagaatgatgatggctgggccggggcccacgaggaggtggactacacagagaagctgaagttcagtgatgaagaagatggccgggacagtgatgaggagggcgctgagggccaccgggacagccagagcgccagcggggaggagcggcccccagaggctgatggcaagaagggcaacagccccaacagcgagccccccacccccaagacagcctgggccgagaccagccggcccccagagacagagcccggccccccagcccccaagccacccctgcccccaccccaccggggccctgctggcaactggggccccccaggggactacccagacagaggaggccccccctgcaagcccccagccccagaagatgaagatgaggcctggaggcagaggaggaagcagagcagcagcgagatcagcctggccgtggagcgggccaggagaagaagagaggaggaggagaggaggatgcaggaggagcggcgggccgcctgtgccgagaagctgaagaggctggatgagaagtttggagccccagacaagaggctgaaggccgagcctgctgcccctcctgctgcccccagcaccccagcccctcctcctgctgtgcccaaggagctgcctgcccccccagcccctcctccagccagcgcccccaccccagagaaggagcctgaggagcccgcccaggcccccccagcccagagcacccccaccccaggagtggccgccgcccccaccctggtgtctgggggcggcagcaccagcagcaccagcagcggcagctttgaggccagccctgtggagccccagctgcccagcaaggagggccctgagcccccagaggaggtgcccccacccaccaccccacctgtgcccaaggtggagcccaagggagatggcatcggccccacccggcagccccccagccagggcctgggctaccccaagtaccagaagagcctgcccccacgcttccagaggcagcagcaggagcagctgctgaagcagcagcagcagcaccagtggcagcagcaccagcagggcagcgccccacccacccctgtgccccccagccccccccagcctgtgaccctgggcgctgtgcctgccccccaggcccctcctcctccacccaaggccctgtacccaggggccctgggccggcccccacccatgccacccatgaactttgacccccgctggatgatgatccccccctacgtggacccccggctgctgcagggccggccccccctggacttctacccacctggggtgcaccccagcggcctggtgccccgggagaggagtgacagcggcggcagcagcagcgagccctttgacagacatgccccagccatgctgcgggagcggggcaccccacctgtggaccccaagctggcctgggtgggagatgtgttcaccgccaccccagctgagccccggcccctgaccagccccctgcggcaggccgcagatgaagatgacaagggcatgaggtctgagaccccacctgtgcccccacctccaccctacctggccagctacccaggcttcccagaaaatggagcccctggcccccccatcagccgcttccccctggaggagcccggcccccggcccctgccctggcccccaggcagtgatgaggtggccaagatccagaccccaccacccaagaaggagccccccaaggaggagacagcccagctgaccggccctgaggccggcaggaagccagcccggggcgtgggcagcggcggccagggccccccacctccaagaagagagagcaggacagagacccgctggggcccccggcccggcagcagccggcggggcatccccccagaggagcccggggcccccccaagaagagctggccccatcaagaagcccccaccacccaccaaggtggaggagctgccccccaagcccctggagcagggagatgagacccccaagccacccaagccagaccccctgaagatcaccaagggcaagctgggcggccccaaggagaccccacccaacggcaacctgagccctgccccccggctgcggcgggactacagctatgagcgggtgggccccaccagctgccggggccggggccgcggggagtactttgcccggggccggggcttccggggcacctacggcggccggggcagaggagctgctggcaacagcgctgtgacagagagctttgaggagatgatgggcgtggaggtgggccagggcgaccagaccaccctgctgctgcctgaggccgccctgcctgcccggcacggggcccgggtgcagagcatgaggaagagccccagcggggccggcagcggggcccagaagcaggccgcccggcccatgagggtcatctggctgctgcagacccggcggctgccccacccccggcgggagcacagccccaggagccgcagccccaccaccaggagccccaccttccctgccccagcccgcttcaccccaggagtgggggagagcagcctgcctgagggcatcagccctggccccaggagaagagagcccccccaggtgtgccccggctggagccccccagccaagagcctggcccccaagaagcccccaacaggccccctgccccccagcaaggagcccctgaaggagaagctgatccctggccccctgagccctgtggcccggggcggcagcaatggaggcagcaatgtgggcatggaggatggagagcggcccaggagaagaagacatggccgggcccagcagcaggacaagccaccccgcttccggcggctgaagcaggagagagaaaatgctgcccggggcagcgagggcaagcccagcctgaccctgcctgccagcgcccctggccctgaggaggccctgaccaccgtgacagtggccccagccccccggcgggctgctgccaagagcccagacctgagcaaccagaacagcgaccaggccaatgaggagtgggagacagccagcgagagcagtgacttcaccagcgagcggcggggggacaaggaggcccctcctcctgtgctgctgacccccaaggctgtgggcacccctgggggcggcggcggcggcgctgtgcccggcatcagcgccatgagcagaggagacctgagccagagggccaaggacctgagcaagaggagcttcagcagccagaggcctggcatggagcggcagaacagaagacctggccctgggggcaaggccggcagcagcggcagcagcagcggcggcggcggcggcggccctgggggccgcactggacctggccgcggggacaagaggtcctggcccagccccaagaacagaagccggcccccagaggagaggcctcctggcctgcccctgcccccacctccacccagcagcagcgctgtgttccggctggaccaggtgatccacagcaacccagctggcatccagcaggccctggcccagctgagcagccggcagggctctgtgacagcccctgggggccaccccaggcacaagccaggccccccccaggccccccagggccccagcccccggccccccaccaggtatgagccccagagggtgaacagcggcctgagcagtgacccccactttgaggagcccggccccatggtgcggggcgtgggcggcaccccccgggacagcgctggggtgagccccttcccccccaagaggcgggagcggccccccaggaagccagagctgctgcaggaggagagcctgcccccaccccacagcagcggcttcctgggcagcaagccagagggccctggcccccaggccgagagccgggacacaggaacagaggccctgaccccccacatctggaaccggctgcacacagccaccagcaggaagagctaccggcccagctccatggagccctggatggagcccctgagcccctttgaagatgtggccggcacagagatgagccagagcgacagcggcgtggacctgagcggggacagccaggtgagcagcggcccctgcagccagaggagcagcccagatggcggcctgaagggagctgctgagggcccccccaagaggcctgggggcagcagccccctgaatgctgtgccctgtgagggccccccaggcagcgagcccccccggcggcccccaccagcccctcatgatggagacaggaaggagctgccccgggagcagcccctgcccccaggccccatcggcacagagaggagccagaggacagaccggggcacagagcccggccccatccggcccagccaccggcccggcccccctgtgcagtttggcaccagtgacaaggacagcgacctgcggctggtggtgggggacagcctgaaggccgagaaggagctgacagcctctgtgacagaggccatccctgtgtcccgggactgggagctgctgcccagcgctgctgccagcgctgagccccagagcaagaacctggacagcggccactgtgtgcctgagcccagcagcagcggccagaggctgtacccagaggtgttctacggcagcgctggccccagcagcagccagatcagcggcggccacggcctgagcatcaccagcaagcagtggaggcggcccggcacccccagcctgcacccctaccgcagccagcccctgtacctgcccccaggccctgcccctccttctgccctgctgtctggagtggccctgaagggccagttcctggacttcagcaccatgcaggccacagagctgggcaagctgcctgctggaggagtgctgtaccccccacccagcttcctgtacagccctgccttctgccccagccccctgcctgacaccagcctgctgcaggtgcggcaggacctgcccagccccagcgacttctacagcacccccctgcagcccggcggccagagcggcttcctgcccagcggggccccagcccagcagatgctgctgcccatggtggacagccagctgcctgtggtgaactttggcagcctgcccccagcccctcctccagcccccccacccctgagcctgctgcctgtgggccctgccctgcagccccccagcctggccgtgcggcccccaccagccccagccaccagggtgctgcccagccctgcccggcccttccctgccagcctgggccgggcagagctgcaccctgtggagctgaagcccttccaggactaccagaagctgagcagcaacctgggcggccctggcagcagcaggaccccacccaccggccgctccttcagcggcctgaacagccggctgaaggccacccccagcacctacagcggggtcttccgcacccagagggtggacctgtaccagcaggccagccccccagatgccctgcgctggatccccaagccctgggagaggacaggccccccaccccgggagggccccagccggcgggcagaggagcccggcagcagaggagacaaggagcccggcctgcccccaccaagatag

SEQ ID NO: 345129 - DNA, 6450 bp, Artificial Sequence
  derived and/or modified sequence
atgtctgacagaagtggccccacagccaagggcaaggatggcaagaagtacagcagcctgaacctgtttgacacctacaagggcaagagcctggagatccagaagccagctgtggcccccaggcatggcctgcagagcctgggcaaggtggccatcgcccggaggatgcctcctccagccaacctgcccagcctgaaggccgagaacaagggaaatgaccccaacgtgtccctggtgcccaaggatggcaccggctgggccagcaagcaggagcagagcgaccccaagagcagtgatgccagcacagcccagcccctggagagccagcccctgcctgccagccagaccccagccagcaaccagcccaagaggcctcctgctgcccctgagaacacccccctggtgcccagcggcgtgaagtcctgggcccaggcctctgtgacccatggagcccatggagatggcggccgggccagcagcctgctgagccgcttcagccgggaggagttccccaccctgcaggccgccggggaccaggacaaggccgccaaggagcgggagagcgctgagcagagcagcggccctggccccagcctgcggccccagaacagcaccacctggagagatggcggcggccggggcccagatgagctggagggccctgacagcaagctgcaccacggccatgacccccggggcggcctgcagcccagcggccccccccagttccccccctaccggggcatgatgccacccttcatgtacccaccctacctgcccttccccccaccctacggcccccagggcccctaccgctaccccaccccagatggccccagccgcttcccccgggtggccggcccccggggcagcggcccccccatgaggctggtggagcctgtgggccggcccagcatcctgaaggaggacaacctgaaggagtttgaccagctggaccaggagaatgatgatggctgggccggggcccacgaggaggtggactacacagagaagctgaagttcagtgatgaagaagatggccgggacagtgatgaggagggcgctgagggccaccgggacagccagagcgccagcggggaggagcggcccccagaggctgatggcaagaagggcaacagccccaacagcgagccccccacccccaagacagcctgggccgagaccagccggcccccagagacagagcccggccccccagcccccaagccacccctgcccccaccccaccggggccctgctggcaactggggccccccaggggactacccagacagaggaggccccccctgcaagcccccagccccagaagatgaagatgaggcctggaggcagaggaggaagcagagcagcagcgagatcagcctggccgtggagcgggccaggagaagaagagaggaggaggagaggaggatgcaggaggagcggcgggccgcctgtgccgagaagctgaagaggctggatgagaagtttggagccccagacaagaggctgaaggccgagcctgctgcccctcctgctgcccccagcaccccagcccctcctcctgctgtgcccaaggagctgcctgcccccccagcccctcctccagccagcgcccccaccccagagaaggagcctgaggagcccgcccaggcccccccagcccagagcacccccaccccaggagtggccgccgcccccaccctggtgtctgggggcggcagcaccagcagcaccagcagcggcagctttgaggccagccctgtggagccccagctgcccagcaaggagggccctgagcccccagaggaggtgcccccacccaccaccccacctgtgcccaaggtggagcccaagggagatggcatcggccccacccggcagccccccagccagggcctgggctaccccaagtaccagaagagcctgcccccacgcttccagaggcagcagcaggagcagctgctgaagcagcagcagcagcaccagtggcagcagcaccagcagggcagcgccccacccacccctgtgccccccagccccccccagcctgtgaccctgggcgctgtgcctgccccccaggcccctcctcctccacccaaggccctgtacccaggggccctgggccggcccccacccatgccacccatgaactttgacccccgctggatgatgatccccccctacgtggacccccggctgctgcagggccggccccccctggacttctacccacctggggtgcaccccagcggcctggtgccccgggagaggagtgacagcggcggcagcagcagcgagccctttgacagacatgccccagccatgctgcgggagcggggcaccccacctgtggaccccaagctggcctgggtgggagatgtgttcaccgccaccccagctgagccccggcccctgaccagccccctgcggcaggccgcagatgaagatgacaagggcatgaggtctgagaccccacctgtgcccccacctccaccctacctggccagctacccaggcttcccagaaaatggagcccctggcccccccatcagccgcttccccctggaggagcccggcccccggcccctgccctggcccccaggcagtgatgaggtggccaagatccagaccccaccacccaagaaggagccccccaaggaggagacagcccagctgaccggccctgaggccggcaggaagccagcccggggcgtgggcagcggcggccagggccccccacctccaagaagagagagcaggacagagacccgctggggcccccggcccggcagcagccggcggggcatccccccagaggagcccggggcccccccaagaagagctggccccatcaagaagcccccaccacccaccaaggtggaggagctgccccccaagcccctggagcagggagatgagacccccaagccacccaagccagaccccctgaagatcaccaagggcaagctgggcggccccaaggagaccccacccaacggcaacctgagccctgccccccggctgcggcgggactacagctatgagcgggtgggccccaccagctgccggggccggggccgcggggagtactttgcccggggccggggcttccggggcacctacggcggccggggcagaggagctgctggcaacagcgctgtgacagagagctttgaggagatgatgggcgtggaggtgggccagggcgaccagaccaccctgctgctgcctgaggccgccctgcctgcccggcacggggcccgggtgcagagcatgaggaagagccccagcggggccggcagcggggcccagaagcaggccgcccggcccatgagggtcatctggctgctgcagacccggcggctgccccacccccggcgggagcacagccccaggagccgcagccccaccaccaggagccccaccttccctgccccagcccgcttcaccccaggagtgggggagagcagcctgcctgagggcatcagccctggccccaggagaagagagcccccccaggtgtgccccggctggagccccccagccaagagcctggcccccaagaagcccccaacaggccccctgccccccagcaaggagcccctgaaggagaagctgatccctggccccctgagccctgtggcccggggcggcagcaatggaggcagcaatgtgggcatggaggatggagagcggcccaggagaagaagacatggccgggcccagcagcaggacaagccaccccgcttccggcggctgaagcaggagagagaaaatgctgcccggggcagcgagggcaagcccagcctgaccctgcctgccagcgcccctggccctgaggaggccctgaccaccgtgacagtggccccagccccccggcgggctgctgccaagagcccagacctgagcaaccagaacagcgaccaggccaatgaggagtgggagacagccagcgagagcagtgacttcaccagcgagcggcggggggacaaggaggcccctcctcctgtgctgctgacccccaaggctgtgggcacccctgggggcggcggcggcggcgctgtgcccggcatcagcgccatgagcagaggagacctgagccagagggccaaggacctgagcaagaggagcttcagcagccagaggcctggcatggagcggcagaacagaagacctggccctgggggcaaggccggcagcagcggcagcagcagcggcggcggcggcggcggccctgggggccgcactggacctggccgcggggacaagaggtcctggcccagccccaagaacagaagccggcccccagaggagaggcctcctggcctgcccctgcccccacctccacccagcagcagcgctgtgttccggctggaccaggtgatccacagcaacccagctggcatccagcaggccctggcccagctgagcagccggcagggctctgtgacagcccctgggggccaccccaggcacaagccaggccccccccaggccccccagggccccagcccccggccccccaccaggtatgagccccagagggtgaacagcggcctgagcagtgacccccactttgaggagcccggccccatggtgcggggcgtgggcggcaccccccgggacagcgctggggtgagccccttcccccccaagaggcgggagcggccccccaggaagccagagctgctgcaggaggagagcctgcccccaccccacagcagcggcttcctgggcagcaagccagagggccctggcccccaggccgagagccgggacacaggaacagaggccctgaccccccacatctggaaccggctgcacacagccaccagcaggaagagctaccggcccagctccatggagccctggatggagcccctgagcccctttgaagatgtggccggcacagagatgagccagagcgacagcggcgtggacctgagcggggacagccaggtgagcagcggcccctgcagccagaggagcagcccagatggcggcctgaagggagctgctgagggcccccccaagaggcctgggggcagcagccccctgaatgctgtgccctgtgagggccccccaggcagcgagcccccccggcggcccccaccagcccctcatgatggagacaggaaggagctgccccgggagcagcccctgcccccaggccccatcggcacagagaggagccagaggacagaccggggcacagagcccggccccatccggcccagccaccggcccggcccccctgtgcagtttggcaccagtgacaaggacagcgacctgcggctggtggtgggggacagcctgaaggccgagaaggagctgacagcctctgtgacagaggccatccctgtgtcccgggactgggagctgctgcccagcgctgctgccagcgctgagccccagagcaagaacctggacagcggccactgtgtgcctgagcccagcagcagcggccagaggctgtacccagaggtgttctacggcagcgctggccccagcagcagccagatcagcggcggccacggcctgagcatcaccagcaagcagtggaggcggcccggcacccccagcctgcacccctaccgcagccagcccctgtacctgcccccaggccctgcccctccttctgccctgctgtctggagtggccctgaagggccagttcctggacttcagcaccatgcaggccacagagctgggcaagctgcctgctggaggagtgctgtaccccccacccagcttcctgtacagccctgccttctgccccagccccctgcctgacaccagcctgctgcaggtgcggcaggacctgcccagccccagcgacttctacagcacccccctgcagcccggcggccagagcggcttcctgcccagcggggccccagcccagcagatgctgctgcccatggtggacagccagctgcctgtggtgaactttggcagcctgcccccagcccctcctccagcccccccacccctgagcctgctgcctgtgggccctgccctgcagccccccagcctggccgtgcggcccccaccagccccagccaccagggtgctgcccagccctgcccggcccttccctgccagcctgggccgggcagagctgcaccctgtggagctgaagcccttccaggactaccagaagctgagcagcaacctgggcggccctggcagcagcaggaccccacccaccggccgctccttcagcggcctgaacagccggctgaaggccacccccagcacctacagcggggtcttccgcacccagagggtggacctgtaccagcaggccagccccccagatgccctgcgctggatccccaagccctgggagaggacaggccccccaccccgggagggccccagccggcgggcagaggagcccggcagcagaggagacaaggagcccggcctgcccccaccaagatag

SEQ ID NO: 345130 - DNA, 4149 bp, Artificial Sequence
  derived and/or modified sequence
atgctgcgggagcggggcaccccacctgtggaccccaagctggcctgggtgggagatgtgttcaccgccaccccagctgagccccggcccctgaccagccccctgcggcaggccgcagatgaagatgacaagggcatgaggtctgagaccccacctgtgcccccacctccaccctacctggccagctacccaggcttcccagaaaatggagcccctggcccccccatcagccgcttccccctggaggagcccggcccccggcccctgccctggcccccaggcagtgatgaggtggccaagatccagaccccaccacccaagaaggagccccccaaggaggagacagcccagctgactggacctgaggccggcaggaagccagcccggggcgtgggcagcggcggccagggccccccaccaccccggcgggagagcaggacagagacccgctggggccccaggcctggcagcagcagaagaggcatccccccagaggagcccggggccccaccccggcgggccggccccatcaagaagcccccaccacccaccaaggtggaggagctgccccccaagcccctggagcagggagatgagacccccaagccacccaagccagaccccctgaagatcaccaagggcaagctgggcggccccaaggagaccccaccaaatggaaacctgagccctgccccccggctgcggcgggactacagctatgaaagagtgggccccaccagctgccggggccggggccgcggggagtactttgcccggggccggggcttccggggcacctatggaggccggggccgcggggcccggagccgggagttccgcagctaccgggagttcagaggagatgatggccggggcggcggcactggaggccccaaccaccccccagccccccggggccgcacagccagcgagaccaggtctgagggctctgaatatgaggagatccccaagagaagacggcagaggggcagcgagactggaagtgagacccatgaaagtgacctggcccccagcgacaaggaggcccccacccccaaggagggcaccctgacccaggtgcccctggcccctcctcctcctggggccccacccagccctgccccagcccgcttcaccgcccggggcggccgggtcttcaccccccggggcgtgcccagccggcggggccggggcggcggccggcccccaccccaggtgtgccccggctggagccccccagccaagagcctggcccccaagaagccacccaccggccccctgccccccagcaaggagcccctgaaggagaagctgatccctggccccctgagccctgtggcccggggcggcagcaatggaggcagcaatgtgggcatggaggatggagagcggcccaggagaagaagacatggccgggcccagcagcaggacaagcccccacgcttccggcggctgaagcaggagcgggagaatgctgcccggggcagcgagggcaagcccagcctgaccctgcctgccagcgcccctggccctgaggaggccctgaccaccgtgacagtggccccagcccccaggagagctgctgccaagagcccagacctgagcaaccagaacagcgaccaggccaatgaggagtgggagacagccagcgagagcagtgacttcaccagcgagaggagaggagacaaggaggcccctcctcctgtgctgctgacccccaaggctgtgggcaccccaggcggcggcggcggcggcgctgtgcccggcatcagcgccatgagcagaggagacctgagccagagggccaaggacctgagcaagaggagcttcagcagccagaggcctggcatggagcggcagaacagaagacctggccctgggggcaaggccggcagcagcggcagcagcagcggcggcggcggcggcggccctgggggccgcacaggccctggccgcggggacaagaggtcctggcccagccccaagaacagaagcaggcctcctgaggagcggcccccaggcctgcccctgcccccacctccacccagcagcagcgctgtgttccggctggaccaggtgatccacagcaacccagctggcatccagcaggccctggcccagctgagcagccggcagggctctgtgacagcccctgggggccaccccaggcacaagccaggccccccccaggccccccagggccccagccccaggcctcccaccaggtatgagccccagagggtgaacagcggcctgagcagtgacccccactttgaggagcccggccccatggtgcggggcgtgggcggcaccccccgggacagcgctggggtgagccccttcccccccaagagaagagagaggcctcccaggaagccagagctgctgcaggaggagagcctgcccccaccccacagcagcggcttcctgggcagcaagccagagggccctggcccccaggccgagagccgggacaccggcacagaggccctgaccccccacatctggaaccggctgcacacagccaccagcaggaagagctaccggcccagctccatggagccctggatggagcccctgagcccctttgaagatgtggccggcacagagatgagccagagcgacagcggcgtggacctgagcggggacagccaggtgagcagcggcccctgcagccagaggagcagcccagatggcggcctgaagggagctgctgagggcccccccaagaggcctgggggcagcagccccctgaatgctgtgccctgtgagggccccccaggcagcgagcccccaagaagacctcctccagcccctcatgatggagacaggaaggagctgccccgggagcagcccctgcccccaggccccatcggcacagagaggagccagaggacagaccggggcacagagcccggccccatccggcccagccacaggcctggcccccctgtgcagtttggcaccagtgacaaggacagcgacctgcggctggtggtgggggacagcctgaaggccgagaaggagctgacagcctctgtgacagaggccatccctgtgtcccgggactgggagctgctgcccagcgctgctgccagcgctgagccccagagcaagaacctggacagcggccactgtgtgcctgagcccagcagcagcggccagaggctgtacccagaggtgttctacggcagcgctggccccagcagcagccagatcagcggcggggccatggacagccagctgcaccccaacagcggcggcttccggcccggcacccccagcctgcacccctaccgcagccagcccctgtacctgcccccaggccctgccccacccagcgccctgctgagcggcgtggccctgaagggccagttcctggacttcagcaccatgcaggccacagagctgggcaagctgcctgctgggggcgtgctgtacccacctccttccttcctgtacagccctgccttctgccccagccccctgcctgacaccagcctgctgcaggtgcggcaggacctgcccagccccagcgacttctacagcacccccctgcagcccggcggccagagcggcttcctgcccagcggggccccagcccagcagatgctgctgcccatggtggacagccagctgcctgtggtgaactttggcagcctgcccccagcccctcctccagcccccccacccctgagcctgctgcctgtgggccctgccctgcagccccccagcctggccgtgcggcccccaccagccccagccaccagggtgctgcccagccctgcccggcccttccctgccagcctgggccgggcagagctgcaccctgtggagctgaagcccttccaggactaccagaagctgagcagcaacctgggcggccctggcagcagcaggaccccacccaccggccgctccttcagcggcctgaacagccggctgaaggccacccccagcacctacagcggggtcttccgcacccagagggtggacctgtaccagcaggccagccccccagatgccctgcgctggatccccaagccctgggagaggactggacctccaccccgggagggccccagcagaagagctgaggagcccggcagcagaggagacaaggagcccggcctgcccccacccaggtag

SEQ ID NO: 345131 - DNA, 6474 bp, Artificial Sequence
  derived and/or modified sequence
atgagcgaccggagcggccccaccgccaagggcaaggacggcaagaagtattcatccctgaatctgtttgatacatacaaagggaagtctcttgaaattcagaagcccgccgtcgcccctcgtcatgggctgcagtccctgggcaaggtggctatcgctcggcgcatgcccccccctgccaatcttccatcattaaaggcagaaaataaaggtaacgatcccaacgtgtctctggtcccgaaagacggcacggggtgggcttccaagcaggagcagagtgaccccaagagcagcgacgcgagcacagcacaacctttagagagccagcctctacctgcttcccagacccctgcctcgaaccagcccaagagaccccccgcagcacccgaaaacaccccgctggtaccctctggggtcaagtcttgggcccaggcatccgtgacccatggagctcacggcgatggcgggagagcctcttccttactgagtcgcttcagcagggaggagttccctacacttcaggcagccggggatcaggacaaagcggcaaaggaacgggagtccgcagaacagtcatccggcccaggacctagcctgcggcctcagaactccactacctggcgggacggcggagggcgcggacctgatgaactcgaaggccccgacagcaagcttcaccatgggcatgatcctagaggcggcctgcagccttctgggccaccacagtttccaccttatcggggtatgatgcctccctttatgtaccctccctacttgccatttccacccccttacgggccacagggaccttatcgctatccaacccctgacgggccctcaaggttcccccgcgtggccggacctcggggttcaggccctccaatgcggctggtggagcctgtcggtcggccatccatcctgaaggaagacaatctgaaggaatttgatcagctcgatcaggaaaatgacgatgggtgggcaggcgcccacgaggaggtggactatactgagaaactaaagttcagtgacgaggaagatggtcgggattcagacgaagaaggtgccgaggggcaccgagacagtcagtcggctagcggggaagagaggccaccggaagccgacgggaagaaaggtaactcccccaacagcgaacccccgactcctaaaactgcttgggctgaaacatcccgcccccccgaaacggagcccggccctccagccccaaaaccacctctgccgcctcctcaccggggccctgccgggaattggggaccaccgggggattatcctgacagagggggccccccctgcaagccgcccgccccggaggatgaagatgaggcttggcggcaacggagaaaacagtcatcttccgagatcagcttggcggtggagcgtgccaggcgaagacgggaggaggaggaacggaggatgcaagaggagaggagggccgcttgtgcggagaagctcaagaggctcgatgaaaaattcggggctccagataagcggttgaaggccgagcccgccgccccccccgccgccccttcaactccagctccacccccagcggtgcctaaggaacttcccgccccgccagcccccccgcctgcttcagcgcctacaccggagaaggaacctgaggagcccgctcaggcccctcccgcacaatctacacccacacccggcgtggctgctgccccaaccctggtgtccgggggaggcagtaccagcagcacctcttccggctcattcgaggcaagccctgtagagcctcaactcccctcaaaggagggtcctgagcctcccgaggaggttcctcctcccactacgccaccagtcccaaaggtggagccaaaaggggacggcattgggcctactcgccagccccctagtcaaggcctggggtaccccaagtaccagaagagcttgccgcccaggttccagagacagcagcaagagcagctcctgaagcagcagcagcagcaccaatggcagcagcatcagcagggctccgcgccacctactcctgtcccgccaagccctccccaacctgttactctcggcgctgtgcccgccccccaggcaccaccaccccctccgaaagccctctacccaggcgcactgggtcggccacccccaatgccccctatgaactttgatcctaggtggatgatgatccctccttacgttgatccgaggttgctccaggggcgccccccccttgatttctacccccccggcgtgcatccaagtgggctggtgccacgcgagcggagcgactcaggaggctcatcgtcggaaccctttgatcggcatgctcccgcaatgctccgggagagaggcactcctcccgtggatccgaagctggcctgggttggcgatgtgttcactgccactccagccgagccacgacccctcacatcgcctcttcgccaggctgcagacgaagatgacaaaggcatgcgtagtgaaaccccgccggttccccctccacctccttacttagccagttacccggggttcccggaaaatggcgcccctgggcccccaattagccggtttcctctggaagaaccaggtccacggcctttaccctggccacccggaagcgacgaggtggcaaagatccagacaccccccccaaaaaaagaaccccccaaagaagagacagctcagttaactggaccagaagccggcaggaaacccgctcgtggtgtcggctctggaggccaagggccaccgcccccacggcgggaaagccgaaccgagacccggtgggggccccgccccggtagttctcggcgcggcatcccaccggaggagccgggcgcaccgccgaggagagctggcccaatcaagaaacccccacctccaacaaaggtggaagaactacccccgaagccactggaacagggcgatgagacgcccaagccacctaagccagacccattgaagataaccaaaggcaagctgggagggcccaaggagacacctcccaatgggaacctgtcgcccgctccgaggctgagacgcgattacagctacgagagggtgggacccacatcctgtcgcggaagaggaagaggagagtacttcgcgagaggccgagggttcagaggcacctatgggggaaggggacgcggagcaaggtcaagagagttcagatcatacagggaatttcgcggcgatgatggtcggggaggtggtactggaggcccgaaccacccacctgcaccaagaggaagaaccgcatctgagacccgctccgagggctctgagtatgaggaaatccctaagagacggcgccagaggggaagcgagacaggttcagaaactcatgaatccgacctcgctccctctgataaggaagctcctacacctaaggagggaaccctgacacaggtgccgcttgcgcctccaccccctggagccccaccctcacctgccccagcccgttttacagcacgaggcggacgcgtgttcacacccaggggtgttccgagtaggagaggtagaggcggcggcaggccgccgccacaagtctgccctggctggtctccccctgccaagtctcttgctcctaaaaagccacccacgggcccactgccaccttctaaagagccacttaaggaaaaactgattccaggcccgcttagtccggttgcgaggggtggtagcaatggaggctccaacgtgggcatggaggacggcgagaggccacgcaggaggcggcacggccgcgcccagcaacaggacaaaccaccaagattcaggagactaaaacaggagcgcgaaaatgctgcacgaggatcggagggaaagcccagtctaacccttcccgcctctgctcctggaccagaggaagccctgaccaccgtgaccgtggctcctgcccccaggagggctgcagctaagagccccgacttgagcaatcagaattctgatcaggccaacgaggagtgggagactgcctctgagagctccgattttacgtccgagcgccgtggagacaaagaggcacctccgccagtactgctgactcccaaagcggttggtacgcccgggggcggaggcggcggggctgtgccgggaattagtgcaatgtctagaggagacttatcacagcgagccaaggacctgtccaaaagatcctttagctctcaacgtcctgggatggagcgacagaacagacgccctgggccaggtggaaaggcaggatcgtccggtagtagttccggcgggggcggcggcggccctggagggaggaccggaccggggcggggagacaagagatcctggccctcacccaaaaatcgctcccgacccccagaggaacgaccccccggtttaccccttccacctccaccgccttcttcttccgccgtattccggcttgaccaggtaatccatagcaacccagcgggcattcagcaagctctcgctcagctcagcagtcggcagggcagtgtgacagctccaggcggacatcccagacacaagcccggccccccccaggccccccaaggcccaagcccgaggccaccgactcgctacgagcctcagcgcgtgaattcagggctgagttctgatccccatttcgaggaacctggccctatggtgaggggggtgggagggacccctagagattcagccggtgtatcaccttttccaccgaaacgccgggaacgtccacctagaaagcccgaactgctgcaggaggagagtctgcctcctcctcattccagcggattccttggatcaaaacccgaaggccccggcccgcaagctgaaagtcgggatactggaaccgaggcacttacccctcatatctggaatagactccacacagctacgagcagaaaatcatatagaccctcgagcatggagccgtggatggaacctctgtcaccttttgaagacgtcgccgggacagaaatgtcacagtccgactctggggtagacctcagcggggactctcaggtgagttctggaccttgttcacagaggtccagcccagatgggggcctaaagggtgcggctgaagggcctcctaagcgccccggtggttctagtccactcaacgcagtcccctgcgaaggcccacctggatcggaaccccccagacggcctccgcctgctccccacgacggagatagaaaggagttaccgcgcgagcagcctctgcctcctggacctattggtacagagcgttctcagaggacggatcgtggtacagagcctggtcccattcgaccctctcatagaccagggccgccagtccagttcgggaccagtgacaaagacagcgatttgagattagttgtcggagattcacttaaagccgaaaaagaacttaccgcaagtgtcaccgaggctatccctgtgtctcgcgactgggaacttctgccttccgccgcagcaagcgcagagccgcagtctaagaacttggacagcggccattgcgtgcctgagccctcaagcagtggacagcgcttgtacccagaagttttctacggtagcgccggtccttcgagctcccaaatctccggcggtgccatggattctcaactgcatcccaactccggcggtttcagacccggcacacccagcctgcatccctaccgtagccagccactatacctccctccagggccagctcctccaagtgccctcctatctggtgtagccctgaagggccaatttctggattttagtactatgcaggctactgagcttggtaaacttcccgccggaggggtgctctacccccctccaagcttcctgtattctccagcattctgtccctctcccctgccagacactagtttgctgcaagtcagacaggatctgccatccccctcggacttctattccacgcctctccagccaggtggccagtcgggctttttaccgtctggagcaccggcacagcaaatgctactcccaatggttgatagtcagttaccggttgtgaactttggttccttgccacccgcgccacctccggcaccgccgcccttgagccttctccccgtgggtccagcgctccaacccccatctttagccgtgagaccacctccagcccccgcaactagagtactgccttcccccgcccgtccctttcctgcatccttgggccgggccgagctacaccctgtggaactgaagcctttccaggactatcagaagctgagctcaaatcttgggggacctggaagctcaaggacgccacccaccggcagaagcttcagcggcctgaactctcgactaaaggcgactccctccacctattctggcgtgttcagaacccagagggtcgacctataccaacaggccagtccacccgacgcccttagatggattccaaagccttgggagcgcaccgggcctcccccaagagaaggaccatcacgtcgagccgaggaaccaggctcgagaggtgacaaagaacccggcctaccaccgcctagatag

SEQ ID NO: 345132 - DNA, 6474 bp, Artificial Sequence
  derived and/or modified sequence
atgagcgaccggagcggccccaccgccaagggcaaggacggcaagaaatattcatctcttaatctgtttgatacatacaagggaaaaagtctggagattcagaagccggccgttgcccccaggcacggtcttcaatccctaggcaaagttgctattgcccgccgcatgccacctcctgccaacctgcccagtctgaaggccgaaaacaagggcaatgacccaaacgttagcctcgttcctaaggacggcacaggttgggcttcgaagcaggagcagagtgaccccaagagctctgatgcatctaccgcccagcccccggagagccagcccttgcccgcttctcagacacctgcctctaatcagccgaagcgcccacccgcagcgccagaaaacacacccctggtgccctcaggtgtgaaatcctgggctcaggcctccgtaacccatggtgcacacggtgacggtggtcgtgcatcatcactgctgtcacggttctcacgcgaggagtttcccaccctgcaggctgcaggtgaccaagacaaagccgctaaggaacgtgaatccgcggaacaaagcagtggacctggaccctctctaagaccgcaaaactccaccacctggagggacggaggtggcaggggacccgatgagttggagggaccagattctaagttacaccacggtcacgacccacgagggggactccagccttctgggccacctcagttccccccttatcggggcatgatgcctccttttatgtatccaccgtatctcccttttcccccaccttacggtccccaaggcccctaccgataccccactccggacggtccttcacgattccctagggtcgccggcccacgaggatccggcccacccatgagattggtggagccagtcgggagacctagcatcctcaaagaagataaccttaaggaatttgatcaactggatcaagagaacgacgacggatgggcaggtgcacatgaagaagtggactataccgagaaactcaagttctctgatgaggaagacggtcgggacagcgacgaggagggtgctgaggggcacagagactcccagagtgcctctggcgaggagagacctcccgaagccgacggtaagaaaggtaatagccctaattcagaacctcctaccccaaagacagcctgggctgagacatctcgcccgcccgagaccgagcccggaccccccgcccccaaaccgccactgccccctccccacagggggcctgccggcaactggggaccaccaggagactatcccgatagaggcggaccaccttgtaagccacctgcaccggaggacgaggatgaagcatggcgccagcggagaaaacagtccagcagcgagatcagccttgcagtggaacgggccaggcgccggcgggaggaggaggaacgcagaatgcaagaggagaggagagccgcctgcgcagagaagcttaaaagattggatgagaagttcggtgcccccgataagcgcctcaaggcagaacctgctgcacctccagcagcccctagcactcccgccccacctcctgctgtccccaaggaactgccagctcccccggcgcctccgccggcatcagcccctacaccagaaaaagagccagaagagcctgcccaggcaccacccgcacagtccaccccaacaccaggtgtggcagccgccccaacactcgtgtccggaggcggaagtacctcctccacctcttctggctccttcgaagccagtcccgttgagcctcagctgccctcaaaagaagggcccgaaccacctgaggaagtgcctcccccaacaacaccacccgtgcccaaggtggaaccaaagggggacggaatcggtcctacccgacaacccccctcacaaggactaggatacccaaaataccaaaagtccctgccgcccagatttcaaagacaacagcaagaacagctgttaaagcagcagcagcagcaccagtggcagcaacatcagcaaggcagcgctccaccaaccccagtcccccccagccccccacagcccgttacgttgggggccgtgcctgccccacaggccccacctccaccaccgaaagctctgtaccccggggctttaggaaggccacctcccatgcctcctatgaatttcgatccacgatggatgatgatcccaccgtatgttgacccccgcctcctccagggaaggcctcccttagacttttacccacctggggtacatcccagcgggctcgtgcctagagaacgttctgattccggtggatccagttccgagccatttgaccgccatgcaccggccatgctgagagagcggggtactccgccagtggaccctaaactggcctgggtcggcgacgtgtttacagcgacaccagcggaaccaagaccattgactagtcctttaaggcaggccgcggacgaggacgataagggaatgaggagtgagactccaccggtaccacctccacccccttacttggcgtcatatcccggctttccggagaacggcgcgccgggccctccaatctccagattcccgctggaggaacccgggcctagaccacttccttggccacccggctcagacgaggttgcaaaaatccagacacctccgcccaagaaagagcccccaaaagaagagactgctcagctaactggacccgaggcaggtagaaagccagcgcgtggcgtcggctctgggggacaaggtccaccccctccccgcagggagtcaaggactgaaacacgctggggccccagacccggctcaagtagacggggaataccacccgaggagcccggcgccccacctcgccgtgcgggacctattaagaaacccccccctcccacaaaagtggaggagctgcccccgaaacctctagagcaaggcgacgagacccccaagccaccaaagccagaccccttaaagattactaaaggtaagttggggggccccaaagaaactcctcctaatgggaatcttagccctgctcctaggctgaggagggattactcttacgaacgtgtcggtccaaccagttgcaggggtaggggccgcggggaatatttcgctagggggagaggattccgggggacatacggaggtagaggcagaggggcaaggagccgagagtttcgctcctaccgtgaattcagaggggacgacggcaggggagggggaaccgggggacccaaccacccccctgcaccacgggggaggacagcctccgaaactcgtagcgaaggctcagagtatgaggagataccgaaacgccgccgccagagaggttccgaaaccggctcggagacccatgaatcagaccttgctcccagtgacaaagaagccccaacgccaaaggagggtacactgacccaggtgccacttgcccccccccctcctggggcccctcccagtccagcgcccgctcgttttactgctagaggaggaagagtcttcacaccacgcggcgtgcctagccgcaggggtcgtggaggaggccgaccaccacctcaggtttgcccagggtggtcgccgccagccaaatccctggcccccaagaaaccaccaaccgggcccctccccccctccaaggaacccctaaaagaaaaactcatcccgggtcctctctcgcctgtcgcgcgcggcggatcaaatggaggctcaaatgtgggtatggaggatggggagcgtccgaggcgcaggcggcatggacgtgcacagcagcaggacaaaccaccacggttccgacgtctgaagcaggagagggaaaatgcagcgagggggtcagagggcaaacctagcctcacactgcccgcttcagcgccagggcctgaggaagcactcactaccgttactgtggcacccgcacctaggcgcgcggcagccaaatccccagatctgtccaatcagaacagcgaccaggcaaacgaggagtgggaaactgccagtgaatcgagcgacttcaccagtgagaggcgaggtgataaagaagctccaccccccgtcctgctgacaccaaaagccgttggaaccccgggcggaggtggtggcggcgccgttccgggaatatcagcaatgtcacgaggagatctctcccaacgggccaaggatttgtccaaaaggagcttcagcagtcagcgtcctggaatggagcgccagaacaggagacctggtccaggcggtaaagccgggagttctggtagctcttctggaggcggtggcggcgggccggggggaaggactgggcccggccgcggagacaagagatcctggcccagtccaaagaatcgtagccgtcccccagaggaacgcccgcccgggcttccgttaccaccccctccaccttcctcatctgccgtgtttaggctcgaccaggtcatccattccaaccccgcaggtatccagcaggcccttgctcagctgtcttccaggcagggttcagtgacggctccaggagggcaccctcgccataagcctgggccacctcaggccccccagggccctagtcctcgcccgccaacaaggtacgaacctcaaagggtgaacagtgggctgagcagtgacccacacttcgaggaacctggcccaatggttagaggcgtgggcgggaccccacgggactcagccggggttagtccttttccaccaaagaggcgggagagacctccccggaagccggagctattgcaagaagagagtcttcccccacctcattcctccggtttcctcggttcaaagcctgaggggcccggtccacaggcagaaagccgggatacggggactgaagctcttacaccacacatctggaacagactgcataccgctaccagtagaaagtcttacagaccctcttccatggaaccatggatggagcccctgtccccgttcgaggatgtggccggaacggagatgtcacagtccgattctggcgtggacctgtctggtgattctcaggtttcctccgggccttgttctcagaggtcctctcccgacggggggctgaagggagctgcggaggggccaccaaagcgcccaggaggcagtagccccctgaacgccgttccttgcgaagggcctcctggcagtgagcctccacgtcgaccacctcctgcaccgcatgacggagaccggaaagagcttccacgcgagcagcctctccccccaggccctattggaacagagcgaagccagcggactgatagaggtacggagcccggacctatccggccttcccaccgccccgggccccctgtccagttcggcacgagtgacaaagattcagacctgcgcctggtggtgggggatagcctgaaagctgagaaagagcttactgctagcgtgactgaggctatccccgtgtcccgggactgggaactgctccctagtgcagccgcctccgccgagccccagagcaagaacctggattccgggcactgcgtccccgaaccctcttcatccggacaacgcctgtaccctgaggttttctacggatctgctggacctagttcttcgcagatatctggtggagccatggattcgcagttgcacccaaatagtggcggtttccgcccaggtacaccatcacttcacccatatagaagtcagcccttatatctgccaccaggcccggctcctccatccgccctcttgagtggggtggccctgaagggtcagttcctcgacttcagcactatgcaggccaccgaattaggcaaattacccgctggaggcgtcctgtaccctccccccagttttctgtacagccccgctttttgtcctagcccccttccggataccagcctccttcaggtccgccaggatctgccttccccatcggatttttactcaaccccactgcagcctggtggtcaaagcgggttcctgcccagcggggcgccagcacaacagatgttgttgcccatggtcgactctcagctgccagtcgtcaatttcggcagcctgcctcctgcgcctccaccagcccctcctccactgtctcttctgcccgttggacccgctctgcagccacccagcctggctgtcagacccccacctgcccctgcaacccgggtgctaccctcacccgcacgccctttcccggcttctctgggacgggccgaattgcatccagtggaactcaagccttttcaggactaccagaaactttcttccaacttgggtggtccgggaagctccaggaccccccccaccggcaggtcttttagtggccttaactctaggctcaaggctaccccaagtacctactcaggggtcttcagaacccagagggtcgatctgtatcagcaggcttccccgccagatgctcttaggtggattcccaaaccgtgggaacgaacgggccctcctccacgagagggccctagcagacgggcggaggaacctggatctcgaggagataaggagccggggctgcctccacctagatag

SEQ ID NO: 345133 - DNA, 6474 bp, Artificial Sequence
  derived and/or modified sequence
atgagcgaccggagcggccccaccgccaagggcaaggacggcaagaaatatagctccttgaacttattcgatacgtacaaaggaaagagtctggaaatccagaagcctgcggttgctccgaggcacggcctccagtctcttggaaaggtggccattgcccgcagaatgccccctcctgcgaatttgccaagtcttaaggccgagaacaaaggaaacgacccaaacgtatccctggtacccaaggacggcacagggtgggccagcaagcaggaacagagtgaccctaaatcttcagacgcctccaccgcgcagccacttgagtcacagccgctgccggcatcccagactccagcctccaatcagccgaagaggccccctgcggctcctgagaacactcctttggttccatctggggtcaagtcttgggcacaggcttcagtgactcacggtgcccatggggacggaggaagagcctcatccctactgtcccggttctctcgagaagaattcccaacgctgcaagcagcgggtgatcaggacaaggccgccaaagaacgtgaatccgcagagcagagtagcggcccgggaccctccctccggcctcagaacagtaccacttggagagacggcggagggcggggtcctgatgagctggagggacctgattcgaaactgcaccatggacatgacccaagaggcgggctgcagccctcgggcccgccgcagttccccccctatcgcggcatgatgcctcccttcatgtacccaccctacctcccctttccacccccctacggaccacaggggccataccgatacccaacccctgacggaccatctcgatttcctcgagtagccggccctaggggaagcgggccccccatgagactggtcgagcctgtcggtcgaccatctattctaaaagaagacaacctgaaggagttcgaccagctcgaccaggaaaacgacgacggttgggcgggagcccacgaagaggtcgattacaccgagaaactgaagttttccgatgaggaggatggtagagactcagatgaagaaggcgccgagggccacagagactcccaaagcgcctcgggcgaggaacggccgccggaagccgacgggaagaaaggtaactcacccaatagcgaacctcctactcctaagacggcttgggcagagacatccagacctccagaaaccgaacccggacctcctgcaccaaaacctcctctgccgccacctcaccgcggcccagccggaaactggggaccaccaggagactatcctgacagaggcggacctccttgtaagccacccgcaccagaggatgaagacgaggcctggagacagcgtaggaagcaatcaagctcggagataagcctggcagtggagcgggccagaaggaggagagaggaagaggaacggcggatgcaagaggaacgaagggccgcatgtgcagaaaaactaaagcgactggacgagaagtttggagcgcctgacaagcggctgaaagcagaacctgccgctccgcccgcggccccatcaacacccgctccccccccggctgtccccaaagaactgccggcacccccggcccctcctccggcctctgcaccaacgccagagaaagagcccgaggagccggcccaggcccccccagctcagtcaaccccgacccctggggttgctgcagctccgactctggtatcaggtggtgggtcgacaagttcaacaagctccggatccttcgaggcttcacccgttgagccccagctgccttcaaaggaaggccccgagcccccggaggaggtaccccctcctacaaccccccccgtgccaaaagttgagcccaagggagatggaatagggccgacccgacaaccgccctcccaaggcctaggatacccaaagtaccagaaaagtctgcccccacgttttcagcgacaacagcaggagcagcttttaaagcagcagcagcaacatcaatggcagcagcaccagcaagggtctgccccccctacccctgtgcctccctccccaccccaacctgtgactcttggagcggttccagccccgcaggcgccgcctcccccccccaaagccctttatcccggcgcgctcggcagaccgccaccaatgcctccaatgaattttgatccaaggtggatgatgatacctccttatgtagacccaaggctcctccaaggcagacctcctttggatttttatccccccggagttcacccatcaggtctggtcccccgggaaaggagcgattccgggggctcatcgtcagaaccattcgaccgccatgcacccgcaatgctgagagaaaggggtacaccccccgtggaccccaaacttgcatgggtgggcgatgtgttcacagccacccctgccgagccacggcctctgacatcgccattgcgacaggccgccgacgaggacgataagggtatgaggtcagagacaccccctgttcctcctccccccccctacttggctagttacccaggcttccccgagaacggggctcccggaccgccaatttcaaggttccccctcgaagaacccggcccccgtccccttccatggccccctggcagcgacgaagtagctaaaatccagacaccccccccaaagaaagaacctccgaaggaggagaccgcacagctgaccggcccagaggcaggcagaaaaccagcccggggagtgggttctggcggacagggccctccacctccacggcgggagtcccgcactgaaacaaggtgggggccacgaccaggatcttctcgaagaggcattccccctgaagagccaggcgccccacctcgaagggcgggacccataaagaagcccccccccccaaccaaggtggaggagctgccgccgaaaccgctggaacagggcgatgaaacaccgaaaccacccaagcccgaccctctgaagataaccaaaggcaagctaggcggtccgaaagagactccgccaaacgggaacctcagccctgcgcctcggctgcgcagggactattcatacgaaagggtgggccccacttcttgccggggccgcggaaggggcgaatattttgccagggggagagggtttaggggcacatacggtggacgcgggagaggagcacggtctcgggaatttcggagttatagagagttcaggggagatgacggtcgtggcggcgggaccggaggaccaaatcacccacccgctcctcgcggccggactgcttctgaaacgcggtctgaagggtcagagtacgaagaaattcccaaacgacggcgtcaacggggcagcgagacaggaagcgagacccacgagagtgatctggctccttctgataaggaggctccgacgcctaaggaggggaccttgacacaggttccgctggctcccccaccacccggcgctcccccttcccctgcccctgccagattcactgccagaggtggaagagtgttcaccccacgaggtgtgccaagccgaaggggccggggcggaggtcgtccccccccacaggtgtgcccagggtggagcccacctgcaaagagtttggcccctaaaaaacctccaaccggacccttgccgccaagtaaagagccgcttaaggaaaagctaattccgggtcctctatctcccgtggcacgaggtggatcaaatggaggctcgaacgtgggcatggaagacggggagcggccccggaggcggaggcacggccgggcccagcaacaagacaaacctcccagattccgcagactcaagcaagaacgcgaaaatgccgccagagggtccgagggaaagccttccttaaccttgccagcttccgccccaggcccagaagaagccctcaccactgtgacggtggctcccgcgcccagaagagcagctgcgaaaagccccgatctgtctaatcagaattctgaccaggctaatgaggagtgggagacggccagtgaatcttcagacttcactagcgagaggcggggcgataaagaagcgccccccccagttctcctcaccccaaaggctgtgggcaccccagggggtggcggtggtggtgcagttccgggaatatcggctatgtcccggggcgacctgagccagagggcaaaagatttatccaagcgtagcttctcaagccaacgccccggcatggagaggcaaaaccgccggcccggtcccgggggcaaagctggatcttccggatcatcttctggggggggaggcggcggccctgggggcagaactggaccaggccggggtgacaaacgttcctggccatcccccaaaaacagatcccgcccaccagaggaaagaccccccggactcccactacccccaccaccccccagctcaagcgctgtgtttcgcctagaccaggtgatccacagcaatcccgccggcatccaacaggccctcgcccaacttagctctcgtcaggggtcagtgactgcccctggaggccatcctcggcacaaacctggccctccccaagccccacagggaccttcacctcgccctcctacccgatacgagccacagcgtgtgaatagcggactgagcagcgacccgcacttcgaggagcccggacctatggtgaggggtgtgggcgggacacctagggacagtgctggcgtcagcccctttcctcctaagcgacgcgaacggcctccgagaaaaccagaactgcttcaagaagaaagcctgccgccaccacactcctcgggatttctgggcagtaagccagaggggccagggccacaggccgaatctagagatacaggaaccgaggccctcacaccgcacatctggaaccgcctccataccgctacatcacgcaagtcctataggcctagtagtatggagccctggatggagccactctctcctttcgaggatgttgccgggaccgagatgtctcaaagtgactcaggagtcgacctctccggagactcccaggtttcctctggaccctgtagtcaacggtctagtcccgacggaggactgaaaggcgccgccgaaggccctcccaaacgacccggcgggagctcacctttgaacgctgttccctgcgagggcccacccggctccgaacctccacgcagacctccacctgccccccatgacggagatcgcaaagaactccccagagaacaaccactgccaccaggtccaatcggcactgagcggtcacagcgaacagaccgcggaaccgaacctggacccattcgaccaagtcatcgcccaggacccccggttcaatttggcacttcagacaaggatagcgatctgaggctcgtcgttggggatagtctgaaggctgagaaggaactgacggcttccgtgaccgaggcgatccccgtttccagagattgggaacttctccctagtgccgccgcctccgctgagcctcagtcaaagaatctggattcaggacactgtgtgcccgagcctagttcctctggtcagcgtctgtatccagaggttttctacggctccgccggtccatccagtagtcagatctccggcggcgccatggacagccagctgcatccaaattccggtggctttcgccccggcaccccgtccctacacccctaccgctcacagccactctacctgcccccgggcccggctcctccctcagccctgttaagtggggtggcgctgaaggggcagttcttggacttctctacgatgcaggcaaccgagttggggaagttgccagccggcggcgttctgtatccacctcccagctttttatacagtccggctttttgccccagcccattgccggatacttctctccttcaggtgagacaagacctccctagccctagcgacttttatagcacccctctccaaccaggaggccagagcgggttcctgccttctggcgccccagcccagcaaatgctactacctatggtggattcacagctcccggtggtaaactttggaagccttcctccagcgccgcctcctgcaccaccccccttgagcctcttacctgtgggccccgccctccaaccgccttctctggctgtgcgcccccctccagctcccgccacccgggtcttgcctagccctgccaggcccttcccagcaagcttgggccgcgcggaactccacccagttgaattgaagcccttccaggattaccagaagctgtcttctaacctgggcggccctggttcatcccgaacaccgccaacagggagatcattcagtggcctgaattcccgcctgaaggcgacgccaagtacctattccggcgtttttcgcacccaaagggtagatctgtaccagcaggcaagtccaccagacgcgctgaggtggattcctaaaccttgggaaagaactggaccccctcctcgcgaggggccgagccgccgtgccgaagagccaggctccagaggcgacaaggagcctgggctcccccctccccggtag

SEQ ID NO: 345134 - DNA, 6474 bp, Artificial Sequence
  derived and/or modified sequence
atgagcgaccggagcggccccaccgccaagggcaaggacggcaagaagtatagcagcctcaatctgttcgacacatataagggtaagagtctcgagatccaaaagcctgcggtggcaccccgtcacggcctgcagagtctcggaaaagtggccatcgcccgtcgtatgcctccgccagctaatctgcccagtttaaaggcggaaaataaagggaatgatcccaacgtgagcctagtgcctaaagatggaacggggtgggcgtctaagcaagagcagtccgacccaaagtcttctgatgcctcaacagcacagccgccagaatcccagccgctgccggctagccagacccccgccagcaaccagcctaagaggccacctgcagctcccgaaaacactcctctggtcccgagcggtgtgaagtcttgggctcaggcttcagtcactcatggggcccatggggatggaggcagggcaagttcactccttagcaggttctcgcgagaggaatttccgacccttcaagctgccggggaccaggacaaagccgctaaggagagggagtccgctgagcagtctagcgggccggggccctctttgcgcccccaaaacagtaccacatggagagacggcggcggacggggaccagatgagttggaaggccccgacagtaaactgcatcatgggcacgatcctcggggggggctgcagccatcaggtccaccccagttcccaccctacagaggaatgatgcctcctttcatgtatcctccttacctccccttccctccaccatacggccctcagggcccttacaggtaccccactcctgatgggcccagccggtttcctcgcgttgccggtccacgggggtcagggcctcccatgcggttggtcgagcccgttggcagacccagtatcctgaaagaggataacttgaaggagttcgatcagctggaccaggagaatgatgacgggtgggctggcgcccacgaagaggtcgattatacagagaagctgaagttctcagacgaggaggatgggcgcgactccgatgaggagggagcagagggccaccgagattcacagtccgcctccggcgaagaacggcccccagaggcagacggaaagaagggcaatagccctaattccgagcccccaacacctaaaaccgcttgggcggaaacatctaggccccccgaaacggagcctggccctccagcccccaagccccccctccccccacctcaccggggaccggctgggaattggggaccccccggcgattacccagacagagggggaccaccttgtaagccccctgccccggaagacgaagatgaggcatggcgacaacgcagaaaacaaagttcaagcgagatctctcttgctgtagagagagcccgtcgcaggagagaggaggaggagcgcagaatgcaggaggaaagacgcgcggcatgtgccgagaaattaaagcgcttggatgagaaattcggggctccagataagagactgaaggcagagcccgccgcccctcccgcagcaccctccacacctgcaccccctcccgccgtgccaaaggagttacccgccccacctgctcccccccccgcgagcgcgccaacacccgagaaggagccggaggagcctgcccaggccccaccagcccagtccacccctacccccggagttgccgctgcccccacactcgtctccgggggggggagtactagttcaacctcctcagggtcgtttgaagcatcccctgtagaaccacagcttcccagcaaggaaggtcccgagccacctgaagaagtgcctcctcctaccacacctcctgttccaaaagtagaacccaagggagacggtataggccccacgcgccaacctccatcccaaggcctcgggtatccaaagtaccagaaatctctgccccccagattccagcgtcagcagcaggagcagctcctgaaacagcagcagcagcaccagtggcagcagcatcagcagggatctgcaccacccactccagtaccaccctcaccccctcagcccgtgactctgggggccgtgcccgcaccacaggcgccacctcccccccccaaagctctataccctggcgccctagggcgaccgccaccaatgcccccaatgaacttcgacccaagatggatgatgattcctccttacgtagacccacgtctgttacagggacgcccaccactggacttctatccgcccggagtccatcccagcggcctcgtgcccagggagcgttccgatagcggcgggtcctccagtgaacctttcgatagacacgctcccgcaatgctgcgagagcgtggtacccctccagtggatccaaagctggcctgggtcggcgacgtcttcaccgccacaccggccgagcctcgccctctgaccagcccactcagacaggccgcagacgaggacgataaagggatgcgcagtgaaacgccccccgtccccccacctccaccctacttagcctcttaccctggctttcctgagaacggcgcaccaggccctcctatctcacggtttcctctggaagagcctggaccccggccacttccttggcctcccggctcggacgaagtggccaagatccagaccccaccaccaaaaaaagaaccccccaaggaggagaccgctcaacttacgggacctgaggccgggcggaaacctgcacggggggtggggagcggcggacaggggcctcccccacctaggagggagagccggacagagacccgatgggggcctcggcccggtagctcccgccgcggcatccccccagaggaaccaggagctccaccacggcgggctgggcctattaaaaagccgccgcctccaactaaagttgaggaacttcccccgaaacccctagagcaaggagatgagacaccgaaacccccgaagccagacccactgaagatcaccaaggggaaactgggagggcccaaggaaactccgcctaacgggaatctgtctccggccccccgcctacggcgggattactcatacgagcgcgttggtcctacatcttgtagggggagaggcaggggggaatacttcgctcgagggcgtggttttcgaggcacctacggcggcagaggccgtggcgcaagatctcgggagttcagatcataccgcgaatttagaggcgatgacggccgcggcggggggactgggggaccgaaccatccgcccgcacctagggggcgaacagcctcagaaaccagatccgaagggtcagaatatgaagagattcccaaacgacgacgacagagagggtcagaaacaggaagtgagacccatgagtctgacctggctcccagcgataaggaggctccaacaccaaaggagggtactttgacccaggtgccattggctccaccaccaccgggtgcccctcccagtccggcccctgctagatttacagcgagaggcggccgggtgtttactcctaggggcgttccttcaaggcggggcaggggtgggggcagaccaccaccgcaggtatgtcccggatggtccccgcccgctaagagcctggcacccaaaaagccacccaccggacccctgccaccctccaaagaaccattgaaagaaaagctcatccccgggcctctgagtccggtagctaggggcggcagtaacggaggctcaaacgtcggcatggaggatggcgagaggcctcggaggaggcggcacggtcgcgcacagcagcaggacaaaccgcctaggtttcgcagactcaaacaggagcgagagaatgccgccaggggctcagagggcaaaccctccttaacactccctgcatctgccccaggacccgaggaggcgcttacgactgtgaccgtggcacccgccccacgcagggccgcagctaagtcacccgatctttccaaccagaactccgatcaggccaatgaagaatgggaaacagcctctgagagctccgactttacttccgagagaagaggggataaggaggctccacccccagtgctcctgactccaaaggctgtggggacccccggcgggggaggcggtggggctgtgcctggaatctctgccatgtcccggggagacctctctcagagagctaaagacctgtccaagaggtccttttccagccaacgtccagggatggaaagacaaaatcggcggccaggcccaggtgggaaggcaggctccagcggctccagctctggcggtggcggaggaggaccaggcggaagaaccgggccggggaggggcgacaagagatcatggccgagtcctaaaaatagaagtcggccacccgaggagcgcccgccaggtctgcctcttccaccaccaccccctagctcctccgccgtcttcaggctcgaccaggtaatccatagcaacccagcgggtatccagcaggcgctggcacagttaagttcaaggcagggctctgtcactgccccaggcggccacccgcgacacaaaccgggccccccacaggctccccaagggccatctccacgaccgcctacaagatacgagccccagagagtgaatagcggtctgtccagtgacccccacttcgaggaacccggtcccatggtccgcggggtcggagggacccctcgcgattccgcaggggttagcccattcccacctaagagaagggagcggccacctcgcaaacctgaattgctgcaggaggagtcccttcccccaccccatagctctggattccttggctctaaacctgaaggaccaggtccccaggccgagtccagagatacgggcaccgaggcacttaccccccatatttggaatcgcctccatactgcaacaagcagaaagtcatatcgacccagctcaatggaaccatggatggagcccctgtccccattcgaggatgtggccgggacagagatgtcacaaagcgactccggggtcgatctctctggagactcacaggtttccagtggaccttgcagccaacgatcaagcccggacgggggcttaaagggggctgccgaagggccacctaaacggcctggagggagctcgcccttaaatgctgttccttgcgaaggacccccagggagtgagcccccaaggcggccaccacccgcccctcatgatggcgatcgtaaggagcttcctcgagagcaaccgctcccccccgggccgattggcacagagcgttctcagcggacagatcgaggtactgagccgggccccatacgaccatcacaccgccctggaccacccgtgcagtttggcacctcagacaaggattcagatctgaggttagtcgtgggtgattctctgaaggcagaaaaagagctcacagcgagcgttaccgaggcaataccagtaagtagggactgggagctactcccctctgccgctgcttccgccgaaccacaaagcaaaaacctggatagcggccattgtgttcctgagccatcttccagcggccagcgcttataccctgaggtgttctacgggagcgcggggccttcctccagtcagattagcggcggcgccatggacagccaactgcaccctaactcaggcggatttcgacctggtacaccctccctacatccttaccgtagtcagcccctgtatcttccacctggcccagcgccaccttccgcactgctttcaggagttgcgcttaaaggccagtttctggacttcagtacaatgcaggctacagagctggggaagttgcccgctgggggggtcctctatcctccaccctcctttctctactcgccggccttctgcccatcccctctccctgatacgtccctcctccaggtgcgacaggacttaccttctccaagtgacttttacagtactcccctccaaccagggggtcagtcaggcttccttccctcaggggctccagctcagcagatgctgttacctatggtggactctcagttacccgtggttaattttggaagcctcccccccgctccaccaccggcaccaccacctctgtctctccttcctgtgggacctgcccttcaacctccaagtctggccgtgagaccccctcctgctcctgcgacaagagtcctgccctctcccgctaggccgtttcccgcgagcctgggccgggcagagctacaccccgttgagctgaaaccattccaagattaccaaaagctgtcctcaaacttggggggcccaggatcctcgcggacacccccaactgggagaagtttcagcgggctaaactcaaggcttaaagccaccccaagtacttattcaggcgtgtttagaacccagcgggtggatctttaccagcaggccagtcccccagatgcgctgaggtggatccctaaaccctgggagcgaaccggaccgccgcctcgggaggggcctagcagacgagctgaagagcccgggtctcgtggtgacaaggagcccgggcttccccctccacgatag

SEQ ID NO: 345135 - DNA, 6417 bp, Artificial Sequence
  derived and/or modified sequence
atgagcgaccggagcggccccaccgccaagggcaaggacggcaagaagtattccagcctgaatctgtttgacacctataagggcaagtccctcgagatccagaagcctgcagtagcgccaagacacggattgcagagcctcggcaaggtcgctattgcaagaagaatgccccctccagccaacctccctagtttgaaggccgaaaacaagggcaacgaccctaatgtctctttagtgcccaaagacgggacaggatgggcatccaaacaggagcaaagcgatcccaaatcaagcgacgcgtccaccgcccagccactggagtcccagccgctgcctgccagccaaacgccagctagcaatcagccaaaacggcctcccgctgctccggagaacactcccctcgtgccgtccggagtgaagtcctgggcccaggcgagtgtgacacatggggcccacggtgatggcggcagggccagtagtttgctgagtagatttagtcgtgaggaattcccaaccctccaggcggccggcgaccaggataaggctgccaaagaacgagagtccgcggagcagtcatcaggcccaggaccttcacttaggccccagaacagtacaacctggcgagacggcggcggtagaggtcctgatgaactggaaggccccgactcaaagctccaccacggacatgatccaagaggtggccttcagcccagcgggcctccacagttccccccataccgaggaatgatgccccctttcatgtacccaccataccttcccttccctccgccctacgggccccagggcccctatcgataccccactcccgacggaccctctcgctttccacgcgtggcaggaccaagaggttccgggccacctatgaggctggtggaacccgtcggacgcccctctatactcaaagaggacaacctcaaggagttcgaccaactggaccaggaaaatgacgatggttgggctggagctcatgaagaggtcgactatactgagaagcttaagttcagcgatgaagaagacggaagggattccgatgaagagggagccgaggggcatagagatagtcagtcagccagtggcgaggagcggcctcctgaagctgacggaaagaagggcaattcacctaactctgagccaccaacccccaagacggcttgggctgagacaagccgacctcctgaaacagagccggggccgccagctcccaaacccccccttccacctccaggcgattacccagatcgtggtggcccgccttgcaaaccgcccgcccccgaggacgaagatgaggcctggagacagagacggaagcagtcttccagtgagatctccctggccgttgagagagccagaaggagacgggaggaggaagagcggaggatgcaggaggagaggcgagccgcctgcgccgaaaaactgaagagattagacgaaaagtttggggcccccgacaaaagactgaaagcagagcctgctgccccccctgcagcacccagcacccccgccccaccaccggcagtgcctaaggaactgcccgccccccccgcgccgcccccggcctcggcccctacgcctgagaaggaaccagaagagcccgctcaggcgccccctgcacagtctacccccacccccggtgttgccgcagcgccaaccctggtctctggtggaggtagtacttcctccaccagctctggttcatttgaagccagtcccgtagaaccgcagctgccgagcaaagagggacctgagccgcctgaagaagtgcctccacctactactccgcctgttcccaaggtcgagcccaaaggagatggcatcggccccacccgacagcccccttcacagggtctgggctatcccaaatatcagaagtcactgcctccccgcttccagaggcagcagcaggaacagcttctgaagcagcagcagcagcaccaatggcagcagcaccaacagggttccgcgcccccgactcccgtgcctccttcaccgcctcagcctgtgacactcggggctgttcctgccccccaagcccctccacctcctcccaaggcactgtaccctggtgctttgggccgtcccccacctatgccacccatgaacttcgaccctcggtggatgatgattccaccatatgttgatccccgcttgctgcagggtcggccacccctagacttttacccacctggagttcacccctctggattagtgccacgcgagagatccgatagcggcggcagttcaagtgagcctttcgataggcatgcgccggcaatgctccgcgaacgcggaactccacctgtggatcctaaattggcgtgggtgggggatgtattcacagctactccagccgagccacggcccttgacatcacctttgaggcaggcagccgatgaggatgacaaggggatgaggtctgaaacccccccagttcctcctcctccgccttacctagctagctaccctggatttccagaaaacggagcacccggtcctccaatctctcgattccccctagaggagcctggcccccggccattgccttggcctcctggctctgatgaagtagctaagatccagacacccccccctaaaaaggaaccccctaaagaagagacggcacagctgacgggcccagaagcaggccgcaaaccagcgagaggcgtgggatctggtggccaaggcccacccccgccaaggagagagtcccggaccgagaccaggtggggtcccagaccaggcagttccaggcgggggattccgcccgaagagcccggagctccgcccagacgggcagggcccattaagaagccccctccccccaccaaagtggaggaactgccccctaagcccctcgagcagggggatgagactcctaaacccccaaagccggatccactaaaaattacaaaaggtaaactaggcgggcctaaggagaccccgcccaatggaaacctgtccccagctcctcgactccgccgagactactcttatgaaagggtgggacctacctcatgtcggggacgcggacgtggcgagtacttcgcccgtgggagaggcttccgcggcacttatggaggaagaggacgtggcgcggccggaaactccgccgtcactgaatcctttgaggagatgatgggtgtggaggtcggacagggagatcagaccactctcttgctgccggaggccgctttgcctgcacgccatggtgcgagggtgcagtccatgcgaaaaagcccaagcggggccggatcgggcgcacagaagcaagcagcacgccctatgcgcgtaatctggctgttacagaccaggaggctccctcaccccaggcgggaacactcccccagatcaaggtcccccacgactcgaagtcccacctttcctgctcctgcgagatttacccctggtgtcggagaaagtagcctgcctgagggaatcagtcctgggccaaggaggagagagccaccgcaggtgtgtccagggtggagcccgccagctaagagcctggccccgaagaaacccccaacgggcccattgccgccaagtaaagagcctctgaaggaaaaactgataccaggacctctttctcctgtggccagaggggggagtaatggtgggagcaatgtcggaatggaagatggagaaaggcctaggagacgccgccatggacgggctcagcagcaagataaaccccctagattcagacgcctgaaacaggaaagggagaatgcagctaggggcagcgagggtaagccaagcttgaccctgccggctagcgcccccgggccggaggaggcactcacaactgtgaccgtcgctcctgcacctcggcgcgcggcggccaaaagcccggatctgtcaaatcagaactcagaccaggcgaacgaagagtgggaaaccgcgtccgaatcgtctgattttactagcgaaagacgcggggacaaggaggcaccgcccccagtactgctaacacctaaggccgtgggcaccccaggaggcggcggaggcggggctgtgcctggaattagtgccatgagtcggggcgatttatctcaaagggccaaggatctcagcaagcgctccttcagctcacagagacccggaatggagcgccagaacaggaggcccggccctggaggaaaagcaggttcatctggcagctcgtcaggggggggtggcggggggcctgggggacggaccgggccagggagaggtgacaagagatcttggccttccccaaagaatcggagtcgcccacctgaggagcgaccacccggtctccccctacctcccccgccaccatcttcttccgccgtatttcgtctggatcaggtcattcatagcaatcctgccggaattcagcaggccctcgcccagttgagcagccgccaagggtctgtgaccgcacccgggggccatcctaggcacaagcctggaccccctcaagcccctcaaggcccaagcccaagacctccaactcggtacgagccgcaaagagtgaattccgggcttagctcagacccccacttcgaagagcccgggcccatggtgcgtggagtcggaggaactcctagggatagcgctggtgtgtcacccttcccacccaagcgccgtgaacggccaccccggaagcctgaactgctgcaagaagagagtttgcctccacctcattcttctggctttctcggctctaaaccagaaggacccgggccccaagcagagtcccgcgataccggaacagaagctttaacaccccacatttggaataggctccataccgcaacgagccggaagagttaccgcccctcctccatggaaccctggatggaacctctcagtcctttcgaagacgtggccggcacagaaatgtcccaaagcgacagcggagtggatctgagcggcgattcacaagtctcgagcggaccttgttcccagcgaagctctccagatggggggctcaaaggagcagccgaaggcccacccaaacggccgggaggttcttctccccttaacgcagtgccgtgtgagggcccccctggtagtgagccaccgaggagaccaccccctgccccccacgacggagatcgcaaggagcttcctcgcgaacaacccctgccaccaggcccaatcggcaccgagaggtcacagagaactgaccgcggcacagaacctgggcctatccgaccctctcataggcctgggccacctgtgcagtttggaaccagcgacaaagactcggacctccgcttagttgtgggggactccctaaaggcagaaaaggaattgacagccagtgtgaccgaggccatccctgtgtcgagggactgggaactgcttccctcagcagcggcgtctgctgaacctcagagtaaaaacttagactccggccactgtgtaccagaaccctcgtcctccgggcagagactctatcccgaggtattctacgggtccgccgggccctcctcttcccagatcagcggcggccacgggctgagtatcacttcaaagcagtggcgtcggcccggtacgccgtcactgcacccatataggtcccaaccactgtatcttccccctggtcctgctccaccaagcgccctattaagcggcgtggccctcaaagggcagttcttggatttcagcactatgcaggccaccgagttggggaagttgcccgcaggcggcgtgttatatcctcccccctctttcctctactcccctgccttctgccctagtcctttgccagatacatccctgctccaggtaagacaagatctgcccagtccaagtgacttttattctaccccccttcagccggggggtcagagcggatttttgccttccggcgcaccagctcagcagatgcttctgccgatggtcgactctcagctgccagtcgtgaactttggctctctgccacccgctcccccacctgctcctccgcctctgagcctgctgccagtggggccggccctccagcctcccagtcttgctgtgagaccccctccagcccctgctaccagagtgttaccgtcaccagctaggccctttcctgcttccctgggtagggcagaactgcatccggttgaactgaagccctttcaggactaccagaagctgagctccaacctcggcggccccggatctagcagaaccccgcctacaggcagaagtttcagcgggctgaacagccgcctcaaagctaccccctccacctactccggagtgttccgaacgcagagagtggatttgtaccagcaagcttccccccccgacgctttgcggtggatccccaaaccctgggagagaacaggccctccccctcgagaggggccttccaggagggccgaagaacccggatctcgcggagataaggaacccggcctcccaccccccaggtag

SEQ ID NO: 345136 - DNA, 6417 bp, Artificial Sequence
  derived and/or modified sequence
atgagcgaccggagcggccccaccgccaagggcaaggacggcaagaaatattccagcttgaatctattcgatacctacaaaggaaaatccttagagatccagaaacccgctgtggccccacggcacggcttgcagtcgctgggcaaggtggctatcgcgcgaaggatgcctccgccagctaatctcccctccttgaaagcagagaacaaaggtaacgaccctaacgtgtccttggtccccaaggacggtactgggtgggcctccaagcaggagcaaagcgacccaaaatcctcagatgcatcaactgcccagccacctgagagtcagccacttcccgctagtcaaacacctgcatctaatcaaccgaaacgcccccctgccgcaccggaaaacacgcctctcgtgccttccggggtgaagtcctgggcgcaagcttccgtgacccacggtgcccacggcgacggtggcagggcctcatcgctgctgtcacggttttcaagggaggagtttcctaccctgcaggcagccggcgatcaggataaggctgccaaagagagagagagtgctgaacagtcttcggggccgggccccagccttcgtccacaaaattctaccacttggagagacggtggaggtcgcggcccggacgaattagagggaccagatagcaagctgcaccatggacacgatccaaggggcggactacagccatcaggaccgccgcaatttcccccctatagagggatgatgccacccttcatgtacccaccctatctacctttcccacccccctacgggccccagggaccttaccgataccccacgcccgacggcccatcacggttcccccgagtggccggacctagaggtagtggtccacccatgcggctcgtagaacccgtcggaagaccgagcatccttaaggaggataacctgaaggagtttgaccagctcgaccaggaaaatgatgacggctgggctggggcccacgaggaagtggattacaccgagaaattaaagtttagcgacgaggaggatggccgtgatagtgacgaggagggagctgaggggcatagagattcacagagcgcctccggcgaagagagacccccagaagccgacgggaagaagggaaacagcccaaatagtgagcctcccaccccgaagacagcttgggctgagaccagtcggcctccggagaccgagcctgggcccccagctcccaagccgccgctgcctccaccgggggattatcctgatagggggggaccaccttgtaaacctcccgcacctgaagacgaagacgaagcttggcgacagaggagaaaacagtcttcatccgaaatttcgctcgcggtggaaagagcaaggcgcagaagggaggaggaggagagaaggatgcaggaagagagacgtgcagcctgcgccgaaaagctgaaacgtcttgacgagaaattcggagcacccgataaacgtctcaaggcagaacccgccgcccccccagccgctcctagcactcctgcgcccccaccagctgtccccaaagaactccctgctcctccagccccacccccggcatccgcaccaactcccgaaaaggagcctgaggaacctgcccaggctccccccgctcaatccacacccactcctggagtggcagccgctcccactctcgtttcaggcggaggatccactagctcaactagttcaggaagtttcgaagcgtcaccggttgaaccacagctacctagtaaagaaggcccagagccgccagaggaagtgcccccgcccaccacacctcccgtcccaaaagtggagccaaagggtgatgggattggccctacccggcagccaccatctcagggcttaggctacccaaagtaccagaagagcctgccacctaggttccagcggcagcagcaagagcagctactcaagcagcagcaacagcatcagtggcagcaacaccagcagggatccgcccctcctactccagtacccccgtcacctccacaacctgtgaccttgggagctgtacctgccccacaggctcccccacctccacctaaagcactttatccgggcgccttaggtcgcccacctcccatgccgcctatgaatttcgatcctagatggatgatgatacctccctacgttgatcctcggctgttgcaagggagaccccccctggacttttacccccctggcgttcacccatccggcctggtgcctcgagaaaggtctgactcaggaggtagcagcagtgaaccctttgatcgccacgccccagctatgctcagagagcggggtactccgcctgtcgatccaaagctcgcatgggtgggtgatgtgttcaccgccacaccggctgagccaaggccactcacatctcccctgaggcaagccgctgatgaagacgataaagggatgaggtcagaaacgcctcccgtgccaccaccgcccccttacctcgcctcctaccctggattccccgagaatggggcgcctggcccccccatctcgcggtttccccttgaggagcctgggcccaggcccctcccatggccgcctggatcagacgaggtggcaaaaattcagactccccctcccaaaaaagaacccccaaaagaggaaacagcccagctcacagggccggaggccggtcgtaaaccagcgaggggagtcggcagcggcggacagggacccccgccaccgaggcgggaatcgcgcacggaaactcggtggggtcctaggccggggtcctcaagaagaggtatcccacctgaagaacctggcgcccccccgcgacgcgcaggtcccattaagaagccaccacctcctacaaaagtcgaagaactaccccccaagcccctggagcagggagacgagacacccaagcctcccaagcccgatcctctgaaaatcacgaaaggcaagctgggcggccctaaggaaactcctccaaacggcaacctctctccagctcctagactgagaagagattattcctacgagagagtggggcccacatcttgccggggcagagggcggggcgagtattttgccaggggacgtggcttcagggggacgtacgggggcagggggcgcggggccgccggcaattctgcagtgactgagagctttgaagagatgatgggcgtggaggttgggcagggtgatcagactactctcctcctccctgaggctgccctgccagccagacatggggcaagagttcagtcaatgcgcaagagccctagcggggctggcagcggagcacaaaaacaggcagccaggcctatgcgagtgatctggctactgcagacacgcagattgccgcacccaaggcgcgaacattcccctcgaagcagatctcccactacacggtcgcccacctttcctgcgccggctcgcttcacaccgggcgtgggcgaaagctccctgccagagggaatatcgcctgggccgagacgaagggagccaccccaagtgtgccccgggtggtctccaccggccaagagtctcgccccaaagaagccacccacagggccactcccccccagcaaggaaccactgaaagagaagctcattcccggcccattgagcccagtggctcgcggtggtagcaatggggggtccaatgtcgggatggaagatggagagcggccacggcgccggaggcacggccgggcccagcagcaggacaagcccccccgttttaggcggctgaaacaagagcgagagaacgctgctcgcgggtctgaaggcaagccctcactgaccctccccgcctcagctcctgggccagaagaggctctcaccaccgtgaccgtggcacccgcaccccgacgtgcagccgcaaagagccctgatctgagcaaccagaactctgatcaagccaacgaagagtgggagaccgcatccgaatctagcgacttcacctcagagcgacgcggcgacaaagaagccccaccccctgtcttgctgactccgaaagcagtcggaacccccggcggcggagggggaggcgcagtcccgggtattagtgcgatgagtcggggagatctatctcagcgagccaaagatctgagcaaacgttcgttctcttcacaaagacccggaatggagcggcagaataggagacccggtcccggtggaaaagccggtagctcaggctctagtagcggagggggtggtgggggaccaggtggcagaacaggacctgggcggggtgacaaacgatcatggccctcacccaaaaaccggtcccggccgccggaggaaaggccgccaggtctgccactgccccccccgccgccttctagcagtgcagtctttaggctagatcaagttatccactctaacccagctggcatccagcaggcactggctcagctgagttcaaggcagggcagcgttactgcccccggcggtcacccccgccacaagccgggtccacctcaagcaccccagggaccaagcccgcgtccccctactcgctacgagccacagcgcgttaattccggactgagttctgatcctcattttgaagaacctgggcctatggtgcgcggcgttggcggtacccccagagactccgccggcgtgagtcccttccccccaaagcggagagagagacccccgaggaaacccgagttactgcaggaggaatccctccctcctccgcactcttccggttttctggggtccaagccagagggccctgggccacaagcagagtcccgggacacaggcaccgaggcgctcactcctcatatctggaataggctacatactgccactagcaggaagagctaccgaccatcctcgatggaaccttggatggagccgctgtctcccttcgaggacgtcgctggtacagaaatgtcccagagtgactccggcgtggatttgtcaggagattcccaggttagcagtggcccatgttctcagcgcagctcacccgatggaggcctcaagggcgccgcagaggggcccccaaagcgaccaggaggcagctcccccctgaacgcagtgccctgcgaggggccacccggctccgagccgccaagacggcctccgcccgcgcctcatgatggcgatcgcaaggagctcccaagggagcagccactcccaccaggccccatcgggactgagcggagccaacggacagatcggggaacagagcccgggccgattaggccctcacaccgtcccggtcctcccgtgcagtttggtactagcgataaggatagtgatttaagactcgtggtaggtgactcgttgaaggccgagaaggaactcacggcttccgttacagaagccattcccgtatcacgtgattgggaactgttacctagcgccgccgcttcggccgagccccagtctaagaacttagattcaggacactgcgtccctgagcccagctcatctgggcaacgcctgtatccagaagtcttctatggcagcgctgggccctcttcatcacagatatcaggcggccatggcctgagtattacctccaagcagtggcgccggccaggcacaccatctctgcacccgtataggagccagcctttgtatctgccaccaggccccgccccaccttccgccctactcagcggagtggccctgaagggacagttcctggatttctctaccatgcaggctaccgagctgggcaaactccccgctggtggcgtgttgtatccacccccttcatttctctacagtcccgctttctgtccatcacctctccccgacacctccttacttcaggtgcggcaggatctcccctcgccctccgacttctacagcaccccattgcaaccgggcggccagtctggatttctgccgagtggagcccccgcacagcagatgctgctgcccatggtcgactctcagctcccagtggtgaattttggtagtctgccgccagcgcccccaccagccccccccccacttagtctgctgccagtgggacccgccttacagccgccttctctagcagttcggccccccccagcccccgccacccgtgtgctccccagccccgcgcgaccctttcccgcttctttaggtcgagcagagcttcatccagtggaactgaagcccttccaggattatcagaagcttagttctaatctgggggggcccggaagcagccggacccccccaacaggaaggagcttttccggcctcaattcaagattgaaagccacacccagcacatactcaggagtgttcagaacccagcgggtcgacttataccaacaggcttccccccctgacgcattgagatggatacccaaaccgtgggagaggactggaccgccacctcgggaagggccgtctcgcagagctgaggagcccggatctcggggggacaaggaaccaggtctaccacccccgcgatag

SEQ ID NO: 345137 - DNA, 6450 bp, Artificial Sequence
  derived and/or modified sequence
atgagcgaccggagcggccccaccgccaagggcaaggacggcaagaaatactctagcctaaatctttttgacacatacaaggggaagtccttggaaatccagaaacctgctgtcgccccccgtcacggtctgcaatcactgggcaaagttgccatcgcccgacggatgccaccgcctgccaacctgccttccctgaaggcggagaacaagggaaacgatcccaatgtttcccttgtccctaaggacggcaccggatgggcaagcaagcaggagcaaagcgacccgaagtcttccgatgcctccaccgcgcagcctccagaatcccaaccactgccggcttctcagacacccgccagcaatcagccaaagcgtccccccgccgctcccgagaacacaccgctcgtgccgagtggggtgaaatcatgggcacaggctagcgttactcacggggcacatggggacggcggcagagcgtcctctcttctgtcccggttcagccgtgaagagttccccaccctccaggctgctggtgatcaggataaagctgcgaaggaacgcgagtccgctgagcagtcaagtggcccggggccctctctccggcctcagaattctaccacctggagagatggtggcggtcgggggcctgacgaactggagggccctgattcaaagctgcatcatggccatgacccccgtgggggccttcagccgtcaggtccaccccagtttcctccgtacagaggcatgatgccccccttcatgtaccctccctatctgccattcccacctccctatgggccgcaaggcccctaccggtatccgactcctgacggcccatcccggtttccacgcgttgcagggcctcgcggctcaggcccacctatgcgcctggtcgagccagttggtcggccttccattctcaaagaagacaatctgaaggaatttgaccagcttgaccaagagaatgatgacgggtgggctggggcacatgaggaagtggattacacagaaaaattgaagttcagcgatgaagaagatggacgcgactctgacgaggaaggcgctgaggggcacagagatagtcaatctgctagtggcgaggaacgaccacctgaagcggacgggaagaagggcaacagcccaaatagtgagcccccaacacccaaaactgcatgggcagagactagccgaccaccagaaaccgagcccggccctccggcccctaaaccccccctcccacctcctcaccgaggtcctgctggaaactggggtccacccggagactaccccgaccggggggggcctccatgcaagccacccgctcccgaagatgaggatgaagcatggcggcagcggcgcaaacaaagcagtagtgaaatatcactcgcagttgagcgagcccggcgcaggagagaggaggaggaacgccgcatgcaggaggagcgcagagctgcctgcgccgagaagctgaaacgcctggatgagaagttcggtgccccagacaagagattaaaggccgagccagcagctcctcccgcagccccaagtaccccggctccccctcctgctgtgccaaaggaattgcctgccccaccagcacctccacccgccagtgcccccacgccagagaaagagccagaggaaccagcccaagctcccccggcccagagtacgccgaccccaggtgtggctgccgctccgactctggtctccggtggcgggtccacctcctctaccagctctgggtcatttgaggctagtcccgttgaaccccagctgccttccaaggagggtcccgaacccccagaggaagtgcctcctcccaccacgccaccggttcctaaggtagagcctaagggggacggtatcggcccaacccgccagccgccatcccaaggcttagggtaccctaagtatcagaaatcgttgcctcctcgattccagaggcaacagcaggaacaactcctcaaacagcagcaacagcatcagtggcagcaacaccaacagggttctgccccgcccactcctgtcccaccatctccgccacagcccgtcacgttgggtgcggtgccagccccccaggctcccccaccacctcccaaagcactgtacccaggggcactgggaaggcctccaccaatgcccccaatgaacttcgatccacgttggatgatgattcccccctacgttgatccacggctgctccaaggccgaccacctctggatttttatcctccaggtgtacacccttcaggtctcgtcccaagagagcggtccgacagcggcgggtcctcgagcgagccttttgatagacacgctcccgcgatgttgcgagagagaggcactcctccagtggaccctaagctcgcctgggtgggcgatgtctttaccgcaacccccgcagaacctaggcccctgactagtccgctcagacaggctgctgacgaggacgacaagggcatgaggtcggagaccccacctgtgccccctcctccaccataccttgcctcgtaccctgggttcccagagaacggcgctccaggaccacccatcagtagatttccccttgaagaacccggaccccgtccactgccttggcctccaggctcagatgaagtagctaagattcagacaccaccccctaagaaggagccccccaaggaggaaactgcccagctcacaggcccagaggctgggcgaaagccagcccgcggggtcggcagtggaggtcaaggaccaccacctccccggcgcgaaagccgaaccgagacccggtggggccctagacccggttcatccaggcgtggcatccctcctgaagaacctggcgcaccgccaaggcgagcgggacccatcaagaagccccccccccctacaaaagtggaggagctgcctcctaaacccctggaacagggggatgagactcctaaaccccctaaaccagaccctctgaaaattacgaagggtaaattgggcggacctaaagagacaccccccaacggcaacctcagcccggccccaagactccgacgagactattcatacgagcgcgtcgggcctacatcctgcaggggaagagggagaggcgagtactttgctaggggtcgcgggtttagaggtacctacggaggcaggggcagaggcgccgcaggcaacagcgccgtaaccgaaagctttgaggaaatgatgggcgttgaagtggggcagggggaccagacaaccctgctcctccctgaggccgccctacctgcacgccatggggcacgtgtgcagagcatgcgtaaatccccatctggggcaggaagcggcgctcagaagcaggccgctaggcccatgcgggttatttggctcctccagactcgccgtctgccacacccacgcagagaacacagcccgcgatcacggagcccgacgactagaagtcctaccttccccgctcctgcacggttcactcccggggttggagagagtagtctgccagaagggatttcaccaggacctagacgccgggaacctccccaggtctgtccgggctggtcgcccccagccaaatcgttggcacccaagaaacccccaactggcccattgcctcccagcaaggagcccctgaaggaaaagctcattccaggccctctgagtcctgtcgcccgagggggatccaacggcggctccaatgttgggatggaggacggggaacgtcccaggaggcgccgccatggtagagctcagcagcaggacaagccaccccgttttagacggctgaaacaggagcgtgaaaatgccgcgcgaggatcagagggaaagccgtccctcacccttcccgcgagcgcgccaggaccggaagaagccctgacaacagtgacggttgctccagcacccagacgcgcagcggccaagagtccagacctgagcaaccagaactcggatcaagcgaatgaagaatgggaaacagccagtgagagctcggactttacgtcggagagaagaggggataaagaagctcctcctcccgtactgttgacgcccaaagccgtgggcacaccaggcggcggaggcgggggagccgtccctggaatcagtgcgatgagccgaggcgatctatcccagcgggccaaggacttgtctaagagatccttttcgtcacagcgtcccggcatggaacggcagaatcgccggcctggccctggggggaaggccggctcgtcaggctccagctctggcggagggggcggggggcccgggggccgcactggccccggcagaggagataaaagaagctggcccagtccaaaaaatcggagcagaccacctgaggagcggccccccggtctccctctgccccctcctcccccatcttcaagcgccgtatttagacttgatcaggtgatccactccaatccggcgggcatacagcaagccctagcccagttatcctccaggcagggctccgtgacagcccccgggggccatccgagacacaaaccagggccaccccaggcccctcagggaccatcaccccggccccctacacgatacgagccacagagagtcaactccggtctgagtagcgatcctcactttgaagaaccggggcccatggtgcgcggtgtgggaggtacccctcgcgatagtgccggggtcagtccttttcccccgaagagacgggagcggccgccacggaagcctgagctgttacaggaggagtctctgcccccaccccatagcagcggcttccttgggagtaagccagaaggccccggcccgcaagccgaaagccgagacactggcacagaggcccttacgccgcacatttggaaccgtctccataccgccactagccggaaatcgtatcgcccttctagcatggaaccatggatggaacccctgagtccttttgaggatgtggctgggacagaaatgagtcaaagcgatagcggggtggacctgagcggcgattctcaggtgagttcagggccttgttcgcagcggagcagtcctgatggcggtctcaagggtgccgccgagggtcccccgaaacggccaggtgggagcagcccgctgaacgcagtcccatgcgagggaccacctggatcagaaccgccgagaaggcccccccccgcaccccacgatggggaccgcaaagagctgccaagagagcagccactgccaccggggccaattggaacggaacggagtcagcggacagaccgggggacggaacccggacctattagacctagtcacaggcctggtcctccagtgcagtttgggacttccgataaggacagcgatttacgactcgtcgtgggcgatagtttaaaagccgaaaaggagttgacagcctccgttacagaagcaattccagtgtcccgggactgggagcttcttccttctgctgcagccagtgcagagccccagtctaaaaacctcgatagtggccactgcgtaccagaaccttccagctcggggcaacggctgtacccagaggtcttttatgggagtgctggaccaagttccagtcagatctcgggcgggcacggcctgtcgatcaccagtaaacagtggaggcgacccgggactccctccctgcacccctatcgcagtcagcctctgtacttgcctccaggaccagctccgccatccgccttattaagcggtgtcgcactcaaaggacagttcctggattttagcacaatgcaggctaccgaactgggaaaactgccagctggtggtgtgctgtatccgccgccctcattcctgtactcccccgctttttgcccttcacctttgcccgacacttctctccttcaggtacgccaggatttgccaagccctagtgatttctacagcacccccctccagccgggagggcagtcaggattcctgccttccggggcccctgcccaacaaatgctgctacccatggtcgactcacaattgccagtggtaaattttggttctctgcccccggcccctccccctgccccaccacccctgtctctgctacccgtgggtcctgccctccagccgccttctctcgccgtgagaccccctccggccccagccaccagagttttgccctcccccgctcggccgtttccagcttctctgggcagagccgaactacatccggttgagcttaagccctttcaggattaccagaagctgtccagcaatcttggcggtccaggatcctcccggactccccctactggacgatcgttctctggactgaattctcgactgaaggccacgccatccacatattctggcgtgttccgaactcagagagttgatctttatcagcaggcatctcccccagatgcactccgctggatccccaagccttgggaacgcacaggtcctccaccacgcgaagggcctagtcggcgggcagaagaacctggatctaggggcgacaaggaacctggtttgccccccccccggtag

SEQ ID NO: 345138 - DNA, 6450 bp, Artificial Sequence
  derived and/or modified sequence
atgagcgaccggagcggccccaccgccaagggcaaggacggcaagaagtatagttctctgaatttgtttgatacatacaaagggaaatctctggagattcagaagcctgccgtagcccctcgccacggattgcagtcccttggcaaggtcgcaattgcacgccggatgcccccacctgcaaatctgccttccctaaaagcagagaacaaaggcaatgaccccaatgttagcctggtcccgaaggacggcacggggtgggctagcaagcaagaacagagcgaccccaaatctagcgacgctagcacagcacagccacttgagtcccaacctctgccagccagccaaactccagcgtcaaaccagcctaagcgcccccctgctgcacctgagaacacacctctcgtgccgagcggcgttaagtcctgggctcaagccagcgttactcacggagctcacggcgacgggggtcgggcttcctccctcctctcacggttcagccgcgaggaatttcccacattgcaagccgccggggatcaggataaagcagccaaggagcgtgaatctgctgaacaaagtagcggcccaggtccgagcctcagacctcagaacagcaccacctggcgagacggcggtgggcgcggaccggatgagctggagggcccagactcaaagctgcatcacggccatgatccccgcggcggattgcagccctcagggccccctcagtttccaccctatagaggtatgatgcctcctttcatgtatccaccgtacttgccttttccaccaccctacggtcctcagggaccataccgataccccacgcccgatggtccttcgaggtttccaagagtcgcagggccgcgagggtccgggccaccaatgcgcctggtggagccagtgggacgtccctcgatcctgaaggaggacaacttgaaagagtttgaccagcttgaccaggaaaacgacgacggttgggctggagcgcatgaagaagtagactacactgaaaagctgaaattctccgatgaggaagacggaagggactccgatgaagagggcgccgagggtcacagggacagtcagagcgccagtggagaggagaggccacctgaggctgatgggaaaaaagggaactcaccaaatagcgagccccctactccaaagacagcctgggccgaaaccagtcgcccacctgaaactgaacccggcccacctgctcctaagccacccctgcccccgcctcatcgcgggcccgctggaaattgggggccacctggcgactatcctgatagaggagggcccccctgtaaaccacctgcccctgaggacgaagacgaggcctggcgccaacgccggaagcagtcaagttccgaaattagcttggcagttgaaagagcccgccgaagaagggaggaagaggagcgacgcatgcaggaggaacgcagggccgcttgtgccgaaaagctaaagagacttgacgaaaaattcggagctccagataaacgattaaaagcagagcctgccgctccccctgccgctcctagcacccccgccccgcctccagccgttcccaaggagctccccgcaccacccgcccccccgcccgcaagcgcacccacccccgagaaggaacctgaagagcctgcacaggctcccccagctcaaagcacacccactccaggggtagccgccgcacctaccctggtctccgggggcggatcaactagttctactagttcaggcagttttgaggccagccccgtggagccacagctgcccagtaaggaagggcccgagccccctgaggaggtcccaccgcccacaacaccaccggtaccgaaagttgaaccaaaaggggatggcatagggcctacccgccagccgccgtctcagggcctcggttatccaaaataccagaagagcctgccccccaggttccagcgccaacagcaggagcagctgcttaagcagcagcagcagcaccaatggcagcagcaccagcaggggagcgcaccccccacgcccgttcccccaagtccacctcaaccagtgacccttggcgctgttcctgctcctcaagcaccccccccacctcctaaggccctgtaccccggggctctgggaaggccccccccaatgccacctatgaatttcgatccacgctggatgatgattcctccgtatgtcgatccaaggctgctgcagggcaggccccctctggacttctacccacccggagtgcaccccagcggtctggtgccgagggaacgctctgatagcggaggcagttcgtccgagccatttgataggcacgcgcctgcgatgctgagggaaagaggaactcctcctgtcgaccccaagctggcatgggtgggcgatgtgttcacagctacgcctgctgaaccccggcccctcacctcccctctgcgacaggccgccgacgaggacgacaagggcatgagaagcgagaccccacccgtgccacctccccctccatatctcgccagttatcctggcttccctgagaatggcgcgcccggaccgccgataagccgcttcccactggaggaacccggcccaaggccactcccctggcctcctgggtccgatgaggttgcgaagattcagactccaccgccaaagaaagaaccccccaaagaggagactgcccaattgaccgggcccgaagccggacggaagcccgccagaggggtcggctcgggtggacaagggcctccgccacctcgcagggagtctcgaaccgagactaggtggggaccccggcccggcagttccaggcgaggcatcccacccgaagaaccaggagccccaccgagacgggcaggccccattaagaagccaccaccgcccactaaggtggaagagctgcctcctaaacctctcgaacaaggggatgagaccccaaaacctcctaaaccagatcctttgaaaatcactaagggcaaactcgggggccccaaagagaccccgcccaacggcaacctgtctcctgcgcccagactgaggagggattattcctatgaacgagtaggccctacgagctgcaggggcaggggccggggtgagtacttcgccaggggccgggggttccggggaacgtacggcggtcgcggcagaggcgctgcggggaacagcgctgttaccgagagcttcgaagagatgatgggcgttgaagtgggacaaggcgaccagactactctcttgctcccagaggccgcactgcctgctaggcatggcgcccgggtgcaaagtatgcgcaagagcccctcaggagctgggagtggcgctcagaagcaggccgccagacccatgagggtgatctggttgctccagacccgacgactccctcacccccgtagggaacacagccctcggtcgcgcagccccacaacgcggtcacctaccttccctgcccctgcacgcttcacccctggtgttggagagagctcgcttcctgaaggcatctcacccggccctaggaggcgggaaccaccgcaggtgtgcccgggctggagtccgcccgcaaagtcactggccccaaagaagccaccgaccgggcctctgccgccctcaaaagagcctctgaaggagaagttgattccaggacccctgtcacccgttgcacgcgggggcagcaatggagggtctaacgtgggaatggaggacggcgaacgccctcgacgacgccgtcatgggagagcccagcagcaagataagcctccgcgcttccggagattaaagcaggagagggagaacgccgccaggggcagcgagggtaagccttccctcacgttgcctgcttccgcccctggccctgaggaggccctcacaacggtgacagtggctcctgctccgagaagggccgctgctaaatcccctgatctgtcaaatcaaaatagcgatcaggcaaacgaagagtgggaaactgcttccgaatcaagcgacttcacaagcgagcgaaggggcgacaaagaggccccacctccagtcctccttacacctaaggccgtcgggacccccggaggtgggggtggaggcgccgtgccaggcatctcagctatgagtaggggagaccttagtcagcgagcgaaagatctgtccaaacgcagtttctctagtcaaagacccggaatggagagacagaatcgcaggccaggcccgggaggaaaggcaggctcctcaggctcctcttccggtggcggcggcgggggacctggtgggcgaaccgggcctggccggggcgacaaacggagctggccgagtccaaaaaatcggtcaagacctcctgaagagaggccacctggcctgcctctcccacctcccccgccaagtagttctgccgtgttccggctggaccaggtgatccacagtaatcctgccggcatccagcaggccttggctcagctctcttcaaggcaggggtcagtcacagcacctgggggtcacccgaggcataagccgggccctccccaggctccgcagggccccagcccacggccccccaccagatacgagccacagcgggtgaattccggtctttcaagcgacccccacttcgaggagcctgggcccatggtgaggggcgtggggggaacaccaagagacagtgccggggtctcacccttccctccaaaaagaagggaaaggcccccacgaaagcctgaattgctgcaggaggaatctttaccgcctccccacagttctggtttcctgggaagtaagccggaggggccgggcccccaggcagagtcccgggatacgggcactgaggcacttacgccgcacatttggaaccgcctgcacactgccacatctaggaaatcctatcgtccttcgagcatggaaccatggatggagcctctttccccttttgaagacgttgccgggaccgagatgagtcagtctgatagcggcgttgatctgagcggtgacagtcaggtctctagcggcccgtgtagtcaaaggagcagccccgatggcgggcttaagggggctgccgagggcccaccgaagagaccgggcggctcttcacctttgaatgctgtgccctgtgaagggccaccaggaagtgaaccacctaggcgccctccccccgccccgcacgatggagatcggaaggagctcccgcgggagcagccactgccgcccggcccaattggcacggagcgttcgcagagaactgatcggggcactgaaccaggacccatccggcctagccaccggcctggtcctcccgtccagtttggaacttctgacaaggattctgacctcaggctcgtcgttggtgacagcctcaaggcagaaaaagagttaacagcaagtgtgacagaggctattcctgtgtctcgggactgggagctgctgccctcggccgccgcgtctgctgagccacaatcaaagaaccttgattcaggtcactgtgtgcctgaaccttcctcctccgggcagaggctgtaccctgaagtgttttatgggtccgccggaccatccagctcccagatttctggaggacacggactctcaatcaccagtaagcagtggaggcgcccggggaccccctccttgcacccatatcggtcgcagcctctctatcttccacctggccctgcgcccccaagcgcactgctgtctggcgtcgcactgaagggacagtttctcgatttctctactatgcaggctacagaattaggaaaacttcccgctggcggcgtactttatcctccccccagtttcctgtattcacccgctttttgcccaagcccactgcccgacacatctcttcttcaggtgcgtcaggatcttccctctccatcagatttctattctaccccactccaaccaggaggacaatcaggatttttaccaagcggtgctccggcccagcagatgctgctgcctatggtggattctcagctgcccgtcgttaacttcgggagtctccctcctgcacccccacctgctcctccccccctgtctttactacctgtgggaccagccctgcaaccccccagtctagctgtgagaccaccaccagcccccgcaacccgtgtgttaccgtcccctgcacgaccattccctgcaagtttaggccgagctgagctacaccccgtcgaactcaagccctttcaggactatcaaaagcttagctctaatctgggggggccaggctcctctcgcacgccccctacaggaagatcgttctcaggactgaactcccgcctcaaagccaccccatccacctactctggagtcttccgaacacagcgagttgatttgtaccagcaagcgtccccacccgatgctctccgctggatcccaaaaccatgggaacgcacggggccaccccctagagagggacccagtagacgggcagaggaacctggttcgaggggagacaaggaacctggcctgcctccaccacgatag

SEQ ID NO: 345139 - DNA, 4149 bp, Artificial Sequence
  derived and/or modified sequence
atgctgcgggagcggggcaccccccccgtggaccccaagctggcctgggtgggcgatgttttcacagccacaccagcagagccccgaccattgacttcccctctcagacaggccgctgacgaagatgacaaagggatgagatcagaaactccaccggtcccacccccaccgccttacctcgccagttacccaggcttccccgagaatggcgctcctggacctcccattagtcgtttcccattagaggagccaggaccccgacccctcccatggccacccgggtctgatgaagtggcgaagatccagacgcctcctcctaagaaggagccaccaaaagaggaaaccgcccagttgactggccctgaggcagggagaaagcccgccaggggagtgggatctggcggacagggccctccccccccccggagagagtccagaaccgaaactcgctggggtcccagaccaggtagctctcggagaggaatacctcctgaggagcctggcgcccctcccaggagagccggccccatcaaaaaaccgcctccccccacaaaggtcgaagagttgcccccaaaaccccttgagcagggagacgagacacctaagcccccaaaacccgatcctctgaaaattaccaagggtaagttgggaggtcctaaagagaccccacctaatggcaatctatctcctgcgccacggcttagacgagattattcctacgaacgagttggacctacttcctgtagggggagaggcagaggtgagtacttcgctcgtggacgcgggttccgtggcacttatggcgggcgtgggcgaggcgccagatccagggaattcaggtcctaccgggaattccggggcgacgacggccggggcggcgggacaggtggccccaaccatccacctgctccacgggggcgaaccgcttcggagacccgatcagaggggtctgaatatgaagaaatcccaaaacgacgcagacagaggggttccgaaaccggaagcgagactcacgagtctgatctcgcaccttctgacaaggaagctccaacacccaaagagggcactctgacacaagtgccactggcacctcctccccccggagcaccaccgagtcctgcacccgctcgctttaccgcgagaggtggtcgtgtgtttacaccccgaggcgtgccctcacggcgcggaagaggaggaggcagacctcccccccaggtgtgtcccggctggagcccgccagctaagagtttggctcctaaaaaacctcccacaggccctctacccccatccaaggagccgctcaaggaaaaactcattcccggccccttaagccccgttgcgcgcggcggaagtaacggtggcagtaacgttgggatggaggacggagagagacccagacggagaagacacggcagagcgcaacagcaggacaagccaccccgctttcggcggctgaagcaggaacgggagaatgctgcacgtggatcagagggtaagccctctctgactctaccagccagcgccccagggcctgaggaagctctgaccaccgtaacagtggccccagccccccgccgagctgctgccaaatctcctgacttgtctaaccaaaactccgaccaggcaaatgaagagtgggaaaccgcatctgagtcctccgacttcactagtgaacgacgaggagataaagaagccccccctcccgttctcctgactcccaaggcagtcggaacaccggggggtgggggaggaggtgcagtgccagggatctcagccatgtctcgcggcgacttgagtcagcgagccaaagatcttagcaaacgatcattcagcagtcagcggcccgggatggaacggcagaaccggcggcccgggcccggcggaaaagcagggagttccggctccagtagcggcggcggcggcgggggaccagggggccgcaccggccctggcaggggcgacaaaaggagctggccctcccctaagaaccgcagtagaccgcctgaggaaagacccccgggattgcctctccctccaccgccaccaagctcctctgctgtgttcaggttagatcaggttattcatagcaatccagccggaattcagcaggccttggcacagctgagctctcgccagggatccgtgaccgccccagggggacacccccgtcataagccaggacctcctcaagcacctcaggggccttctccaaggccgccaactcggtatgaaccacagagggtgaatagtgggctgtctagcgacccccacttcgaagagcctggtcctatggtccggggtgtcggcggtacccccagggacagcgctggggttagtccctttccacctaagcgtcgcgagaggcctccacgaaagcctgaactcctacaggaggagagcctgcctcctccacactcctccgggttcctagggtctaagccagaaggaccaggaccccaagccgagagccgggacacaggcaccgaggccctaaccccacatatttggaacaggctgcatacagcaacgtcaaggaagtcatacaggcctagctctatggaaccatggatggagccactaagcccctttgaggacgtggctggaacggaaatgtcccagagcgatagtggggtggatctgagcggagatagtcaagtgagcagcggtccctgtagtcagcggagctctcccgacggaggactgaagggtgctgccgagggccccccgaagcgacctggcggaagtagtcccctgaacgcagtgccatgcgagggaccccctggcagcgagcctcctcgaaggcccccacccgcacctcacgacggagaccgcaaggagctcccaagggaacaacccctacctcccggcccgattggcacagagaggagccagcggaccgaccgcggaaccgagcccggcccgataaggccctcacatagacctggcccccctgtgcaatttggcacaagtgataaggactccgatctcagattggtcgttggcgacagcctgaaggctgagaaagagctgacagcatctgtgacagaagcgatccctgtctctcgggactgggagctccttccctctgccgcggcaagcgccgagccgcagtctaaaaatctcgactccgggcactgtgtcccagaaccctcctcctccggacagcgcctgtatccagaagtgttttacgggtccgctggcccaagtagcagccagatctctggaggtgcgatggactctcagttgcatcctaattcaggtggattccgccctgggacccctagccttcatccgtatagaagccagcccctgtacctgccccctgggcctgcccctccgtcagctctactcagtggcgtggccttaaagggccagttccttgactttagcacaatgcaggccacggagttggggaagctgccggcgggcggtgtgctgtacccgcctccatcatttctgtattctcccgctttttgcccatcacctcttccagacactagtctcctacaggtcagacaggacctgccttctccgtcagacttttactctacaccattgcagcctggcgggcaatccggatttcttccatccggtgctcctgcccagcaaatgctgctgccaatggtggacagccagcttccagtcgtgaactttggatccctgccccctgcgccccccccagctccaccacccctgtccctgctcccagttggtcccgccctgcagcctccttctttggccgtccggcctccccccgctcccgccaccagggttttgcctagtcccgcccgcccttttccagcaagtcttgggagagccgagttacatcctgtggagctgaaaccatttcaagattatcagaagctctcatccaacctcggagggcctggctcctccagaacacccccaacgggtaggtcgttcagcggactgaactccaggttgaaggccaccccatcgacatattcgggggtcttccgcacacaaagggtggacttgtatcaacaagcatcccccccagatgccctccggtggattcccaagccatgggagaggactggcccgccccctagagagggacctagtaggcgggccgaggaaccgggctctcggggcgataaagaacccggtttacctccgcctcgatag

SEQ ID NO: 345140 - DNA, 4149 bp, Artificial Sequence
  derived and/or modified sequence
atgctgcgggagcggggcaccccccccgtggaccccaagctggcctgggtgggggacgtgttcacagccacccctgccgagcccaggcctctgacctcccctcttcggcaggccgccgatgaagatgataaaggcatgaggtcagaaaccccacccgtgcctccccctccaccttatctcgcgagttaccctggcttccctgaaaacggagctcctggccccccaatctcccgatttccactcgaggagcccggccccagacctctgccatggcctccagggtcagacgaggtggccaaaattcagaccccacctcccaagaaagagccccctaaggaagagactgcccagttgactggtcccgaagccggtcgtaaaccggccagaggtgtggggtcaggaggtcaggggccccctccaccccgaagggaatctcgaaccgagacaagatggggcccccggcctggctccagtcgacgtggaattccacctgaggagccaggagcacctccgcggagggccgggcccataaaaaaacctcctcctccaacaaaagtagaggagctcccccctaagcccctcgaacagggcgacgagacacccaaaccgcccaaacctgatccactcaaaatcaccaaagggaagttaggcggacctaaggagacacctcccaacggcaacctgtcccccgctccccgtctacggagagattactcttacgaacgggtgggcccgacaagttgtcgcggtagggggcggggtgagtatttcgcccgtgggcgtgggttcagaggcacatacggtggacggggacgtggggctcgtagccgcgaatttcggtcttatcgcgaatttcgtggagacgatggacgtggagggggaacaggcgggcctaatcatccccctgctccacgaggcaggacagccagtgagacacggtccgaaggtagcgaatacgaggaaattcccaagaggcgaaggcagcgggggtccgagacgggctcagagacgcacgaatcagacctggctccatctgacaaggaagctccaacaccaaaggagggaactttaactcaagtgcctctggctccaccgcctccaggcgcccccccgtctccagctcccgctcgcttcaccgcccgaggtggaagagtgttcaccccgcgaggcgttcccagtcgtcgaggccgaggcggtggacgtccccctcctcaggtgtgccccggttggagcccacccgcgaaatccctcgctccaaagaagccacccaccgggcccctcccccccagtaaggagcccctgaaggagaaacttattcctggtccactgtctcctgtggcccgtgggggatctaatgggggatcgaacgtcgggatggaagacggagaaaggcctcggcgcaggagacatgggcgcgcccagcagcaagacaagccacctcgcttcagacggttgaagcaagagagggaaaacgcggcgagggggtccgaagggaaaccatccctgacccttcccgccagcgctccgggtcccgaggaggcccttactactgtgactgtggctccagcgccgcgcagagcagcagctaagtctccagacctgagcaatcagaacagtgatcaggcaaacgaggaatgggaaaccgctagtgagagttctgatttcacaagtgagagacggggagataaggaagctccgccgcccgtcttactcacaccaaaggcggtcgggactcctggtggcggtggaggaggagcagtgccagggatcagtgctatgagtaggggcgatctgtctcagagggctaaagacctttccaagcggtcattttcatcccagcgcccaggcatggaacggcagaatagacgccctggtcctggaggcaaagccggatcctctggcagttcatctggggggggaggggggggacctggaggcagaactggtccaggacggggcgataaaaggtcgtggccaagtcccaagaaccggagcaggcctcccgaggagagacctcccggactcccattaccgcctcccccaccgtctagctccgcggtctttagattggaccaagttattcactcgaacccagctggcatccagcaggccctcgcccagctttccagccggcagggatccgttacagcacctggtgggcacccacgacataaacccggcccgccacaggccccacagggccctagtcccagaccccccactcgatacgaaccgcaaagagtgaactccgggctctcctctgaccctcactttgaggaaccaggccccatggtccggggtgtagggggaactccccgtgatagtgccggagtcagccctttcccacccaagagaagagaacgtcccccacgaaaacctgagctgctccaggaggagtcactgcctccaccccattcctccggttttcttggaagcaagcctgaggggccaggaccccaggccgaatcacgggacactggaactgaagccttgactccccatatatggaaccgcctgcataccgcgacttcccgcaagagctaccgcccaagctccatggagccttggatggaacctctgagcccattcgaggatgtagccggcacggagatgtctcagtctgattcgggtgtagacttgtccggagactcacaggtgagttccggaccatgctcacagagatcttcacctgacggtggactgaaaggagctgcagagggccccccaaaacgcccaggtggctcatccccgctcaacgcagtgccctgcgaagggccaccaggatccgaacccccaagacgtccacccccggcacctcacgacggcgaccgaaaagagcttccaagagaacagcccttaccccccggcccaatcggtactgagagatcacagcggaccgaccggggtacagaacccggcccaattcgtccttcccaccgtccaggtcctcccgtgcagttcggcacaagcgataaggactctgatctacggctagtggtgggtgattcccttaaggctgagaaggagcttactgcctctgtaaccgaggccatccctgtttcaagggattgggaactgctgcccagtgccgcagcaagtgcagaacctcagtcaaaaaacctggattccggacactgcgtccccgagcccagtagttctggacagcgattgtacccagaggtcttttacggtagcgcgggcccaagttcctctcagatctctggcggggcaatggacagccaattgcaccctaactctggcgggtttagacccggcactccttccttacacccataccggtcccagcctttgtacctcccacctggccctgcccctccaagcgcgctcctttcgggcgtggcgttgaaaggtcagtttctggactttagcacaatgcaggctactgaattgggtaagctccctgccggcggggttttatatccaccaccctcctttctgtactcgcctgccttctgtcctagtcctctccctgatacctcgctactgcaggtgcggcaggacctgcccagccctagcgacttttacagtactcctctgcaaccgggtgggcagtccggctttctgccgtcgggagcaccagcacagcagatgttacttccaatggtggatagtcagctgccagtagtgaacttcggctctctcccacctgcacccccgccggcccctccgccactctctctcttgccggtgggtccggccctgcagccaccatcactggccgtgcgacccccccccgctccagctacgagggtgctgccaagcccggctaggcccttccctgctagtttgggccgtgctgaactacaccccgttgaactcaagcctttccaggattaccagaaactgtcttcgaacctaggcggccctggatcttctagaactccaccgactggacggtcattctcggggctgaactcacgtctgaaagcgacaccaagcacatacagtggagtcttccggacccaacgggtggacctctaccagcaggcttccccccctgatgcgcttaggtggattcccaagccatgggaacggaccggaccacccccgagggaaggcccttccaggcgcgccgaagagccggggagccgaggcgataaggagccaggacttccccctcctcgctag

SEQ ID NO: 345141 - DNA, 6473 bp, Artificial Sequence
  derived and/or modified sequence
atgtcagaccggagcggacctactgccaaggggaaggatgggaagaagtatagtagcctgaatctgtttgacacatataagggaaaatcgctggagattcagaaacccgctgttgcccctcgccacggtctacagtccctcgggaaagtggccattgcgaggcgcatgccaccacctgccaatcttccgtctctaaaggctgagaacaaaggcaatgatcccaatgttagtttggttccaaaggatggaaccggctgggcatccaaacaggaacaatccgatcccaaaagctcggatgctagtacagctcagcctctcgagagtcaacccttacctgcttcccagactcctgcctcaaatcagcccaaaagacctcccgcagcccctgagaacacccctttggttccttctggggtaaaatcttgggcacaagcttccgtaacacacggcgctcacggggatgggggaagagcgagctctctgctgtcacgcttttcccgggaagaatttcccacactgcaggctgcaggggaccaggacaaggcggcaaaggagcgagagtctgcagaacagtcaagcgggcctggccctagcctgcgtcctcaaaacagcacaacttggagggacggcggtggacggggacctgatgaactcgagggtccagactcaaagttgcatcatggacacgatccaagggggggactccagccaagcgggccacctcaatttcccccatatcgcggtatgatgcccccttttatgtaccctccgtacctcccttttccccctccttacgggcctcagggaccatatcgatatcccactcccgacggtcccagcaggtttccgagggttgctggcccaagagggagcggaccacccatgagattggtggaacccgtggggagaccctcaattctaaaagaagataatttaaaagagttcgatcaacttgaccaggaaaatgacgacggttgggccggagcccacgaggaggttgactacaccgaaaagcttaaattttcagatgaagaagacggacgggactcggatgaagagggagccgagggccaccgggattctcaatctgcctcaggggaagagcgcccaccagaagccgatggtaagaaaggcaacagcccaaattccgagccaccaacacctaagacggcttgggccgaaacctcccgtccacccgagacagaaccaggcccaccagcccctaagcctccattaccgcctccacataggggtcccgctgggaactggggcccacctggtgattatccagatagaggcggtcctccctgcaaacctccagcgccagaggatgaggacgaggcctggcgccagcgacgtaaacaaagctcttctgagattagcctggcagtggaacgggcaagaagaaggcgcgaggaggaggaacgcagaatgcaagaagagcgacgcgctgcctgcgccgagaaactgaaacgtcttgacgagaagtttggggctcctgataaacgcctaaaagcggaacctgccgcaccccctgcggcaccctctactccggcacctcccccagccgtccctaaggaacttcctgctcccccagccccacctccggctagtgcccctacacctgagaaggaacccgaggaacctgcacaagctccgccagcccagagcactcccacccctggcgtggcagccgctcccacacttgtgagcggtggaggatctacgtcttccaccagcagtgggtcattcgaggctagcccagtggagccccagctgccctccaaagaaggccctgagcccccagaggaggtaccaccccctaccactccgcctgtgcctaaagtcgagcccaagggcgatggaattggccctaccagacagcctcccagccaggggttaggctaccctaaataccagaagtctcttcccccacgattccagaggcagcagcaggaacagcttttaaagcagcagcagcagcaccagtggcaacagcaccagcaggggagtgcccctcccacgcctgtccctccctctccgccacagccagtgactctcggagctgtgcccgctccacaggcaccacctcctccacctaaggccctctaccctggcgcactgggcaggccacctccaatgccaccgatgaactttgaccccaggtggatgatgatcccgccatacgttgatccgaggctgttacaaggacgcccacccctggacttttaccccccaggcgtgcaccccagcggtcttgtgccacgggaacgcagtgatagcgggggtagcagcagtgagcccttcgaccgccatgcgccagctatgctgcgggaaagaggcactcctccagtggaccccaagctcgcttgggtgggggacgtattcaccgccacacccgctgaacctcgccctctgactagtccactccggcaagccgcagacgaggacgacaaaggcatgagatcagaaacgcctccggtgcctccaccaccgccttacctcgcttcgtaccctgggttcccggaaaacggagcgccagggcctcccataagccggtttcctctggaggaacctgggccacggcctctgccctggccgcctggctcggacgaggttgcaaaaatacagaccccccctcctaagaaggaaccccctaaggaggaaacagcacagctcactgggccagaagcgggaaggaaaccggcacggggtgtgggcagcggaggccaggggcctccaccacctcgacgcgagagtagaacagaaacccgctgggggccacgcccagggagttctaggagaggtatcccaccggaggaacctggagccccacccaggcgcgctggcccaatcaagaagcctccaccaccaacgaaggtggaggagctgccccctaaacccttggagcagggtgatgagactcctaagccccctaagcccgacccactgaagattacaaaaggcaaattgggcggtcccaaggaaacgcctccaaatgggaatttgtcgccagccccacgcctgaggagagattattcatacgagcgagtgggtccaaccagctgccggggtagaggcaggggagagtattttgctcgagggcgtggcttccgcggaacctacggcggaagagggcgaggtgcccgaagccgcgaattccggagttatcgagaatttagaggcgatgacggtcgaggagggggaacagggggtcccaatcacccgccagcccctaggggaaggacagcttcagaaacgagatctgagggcagtgaatatgaggaaataccaaaaaggcgcagacaaaggggatctgagactggatctgagactcatgaatcagaccttgctccaagcgacaaagaggccccaacccccaaagagggcaccctaacgcaagttcctctggcccctcccccaccaggcgcaccccctagtcctgctcccgctcgttttactgcacgaggaggccgtgtgtttactccaaggggagtgccgtcaaggaggggcagggggggagggcgacccccaccccaggtatgcccgggatggagccccccagcaaaaagcttagcccctaagaagccgcctacaggacccctgcccccaagcaaagagccccttaaggagaaactcattccagggccattatcacctgttgctcggggaggttccaacggaggctctaacgtaggtatggaagatggagaacgacctcgtaggcgtagacatggaagagctcaacagcaggacaagccgcctaggtttaggaggctaaagcaggagcgggagaacgccgctcgcggatcagagggaaaaccttctctgactctccccgcaagcgctcccggacctgaagaggctctcacaacagtgacagtagcccctgcacccagacgggcagccgctaaaagtcccgatcttagtaatcagaatagcgaccaagccaacgaggagtgggagaccgcctctgaatcatccgatttcactagcgaacgcagaggagacaaagaggccccaccccctgtcctgctaactcccaaggcggttgggacaccaggaggcggaggaggcggagccgtacccggtattagcgcaatgtcacggggagaccttagccaaagggcaaaagatctaagcaaaagatcattctctagccagcgtcccggaatggagcggcagaaccgaaggccaggccctggagggaaggcagggagcagcggcagttcatccggtggcggtggcggagggccaggtgggcgtacaggcccaggaagaggggacaagcgttcctggcccagtcccaagaatcggtccagaccaccagaagaaaggccacccggattgcctctgccccctcccccaccgtcttcatctgctgtctttcgattagaccaggtgattcacagtaaccccgcaggcattcagcaggctctggcccagttgtcttctcggcagggtagtgttaccgcccctgggggacatccccgacacaagcctggaccgccacaggcaccgcaggggcctagtccaaggccgcctaccaggtacgaacctcagagggtcaactccggactgtcttcagatccgcacttcgaagagcctggccctatggttagaggcgtgggagggacccccagagattctgctggggtttctcccttcccgccaaagcgcagagaacgcccacctaggaagcctgaattactgcaggaggagtccctgccccctccacacagcagcggcttcctggggagtaaacccgagggacccggtcctcaggccgagtctcgagatacgggcacagaggccctcacaccacacatctggaataggttacacacagccacttctagaaaaagctataggccctcatccatggagccgtggatggagcccctgtcaccttttgaagatgtggccggaaccgaaatgagtcagtccgactccggggtggacctgtccggggatagccaagtaagctctgggccatgttcccagcgctcttcacccgatggcggactcaagggcgcagccgaagggcctcccaagagacctgggggatccagtcccctcaacgcagtcccctgtgaaggccctcccggttctgaacctccaaggcgcccaccacctgcgcctcacgacggggaccggaaggagctcccccgagagcagcctcttccacctgggccaatcggtaccgaacgatctcagaggaccgataggggcacagaaccagggccaatacgcccatcccaccggcctggccctccagtgcaattcggtactagtgacaaggacagcgacctccggttggtagtgggtgactctctgaaggctgagaaggagctcactgcctccgttactgaggcaatacctgtgagtagggattgggagcttctccccagcgcagccgctagcgccgagccccagagtaagaatctcgacagcggccactgcgtccccgagccaagcagctcaggacaaaggttgtatccggaggtgttctatggatcagccggacccagttcctcgcagatttctgggggagcaatggactcccagctacatccaaattctgggggatttcggccaggcacccctagcctccacccttatcgctctcagcctttatatctccctcccggacccgctccgccaagcgctctgctgagcggagtggctctgaagggccagtttctggactttagcactatgcaagcaactgaactgggaaagctccctgccggtggcgtgctgtatcctcctccaagctttttgtattcccctgccttctgcccgtcccctttgccagacacctctctgctgcaggtgcggcaggacctgccttctccgtccgacttctacagtacacccctgcagccaggtggacaatccggattcctgcctagtggagcacctgctcagcaaatgttactccccatggttgattcccagctccccgtcgtcaacttcggtagcctgccccctgctccacctcctgcccctcctcctctgtccctgctgcctgtcggccctgccctgcaacccccttcactcgccgttagaccacccccagcacccgctacccgagttttgccctctcctgctaggccattcccggcatctctggggagggcggagctccacccagtggagctaaaacctttccaggactatcaaaaactttccagcaatttaggcggacccggaagctcacgtacaccccctactggacgttcattctccggtctgaattcaagactgaaggccaccccctctacatattccggagtcttccggacacagagagtcgacctttatcagcaagcctcaccaccagacgctctccggtggattccaaaaccgtgggagcggacaggtccacctcccagagaaggcccaagcagaagggccgaggaacctggctctaggggggataaggagcctggcttaccaccacccaggta

SEQ ID NO: 345142 - DNA, 6473 bp, Artificial Sequence
  derived and/or modified sequence
atgagcgaccggagcgggcctacagcaaagggaaaggatggaaagaagtatagctccctcaaccttttcgacacatataaggggaaatccttagaaatacaaaaaccggcagtggcaccaaggcatggcctccagagcctcgggaaggtcgcgatcgccagacggatgccaccccctgcaaatctgccaagtttaaaggccgagaacaaagggaacgatcccaatgtctctctcgttcccaaggacggtacaggctgggctagtaagcaagagcagtccgacccaaagagtagtgatgcttctaccgcgcagcctccagagtcccagccactgcccgcttcgcagacccctgcaagcaaccagcccaagcgaccgcctgctgccccagaaaataccccacttgtgccgagcggggtgaaatcctgggcacaggcaagcgtaacacacggtgctcatggtgacgggggtagggcctcaagtctgctttcgcggttttctagggaggaatttcccaccttgcaggccgcaggagaccaggacaaggccgctaaggaaagggagtcggctgaacagagctcaggacctggtccttctctgcggccacagaattccacgacatggagggacgggggaggcagaggccctgacgagctcgaggggcctgattcaaaactgcaccacggacacgaccctagggggggtctccagccttctggccctcctcagtttcccccatatagggggatgatgcccccttttatgtacccgccttatctcccctttcctcccccatacgggccacagggaccataccgctacccaacacccgacggcccaagccgcttccccagggtggctggacccagagggagtggaccacctatgcgcttggtggagcccgttggccgaccaagcatcctcaaggaagacaatttgaaagagtttgatcagctggatcaagagaacgatgacggctgggctggtgcccacgaggaagtggattacaccgagaagcttaagttcagcgacgaagaggacggcagagactcagatgaggaaggagccgaaggacacagagactcccagagtgcaagcggggaggaaagacctcctgaagccgacggtaaaaagggaaactctccaaatagcgagcccccaaccccaaagacagcttgggctgagacctctaggcctccagagacagaacctggccctccagcccctaaacctccccttccgccaccacaccggggacctgccggaaactgggggcctcccggagactacccagacagaggaggccctccctgcaagcccccagccccagaggacgaagatgaagcctggagacaacgtcgcaagcaaagttcatccgaaattagtttggcagtagagagggccaggcggcgtagggaagaagaggaaagaagaatgcaggaggaaagacgggcagcttgtgctgagaaactcaaaagactcgatgagaaattcggcgctccggataaacgtctgaaagccgaaccggctgcaccgccagcggctccgtctacgcctgcccctccaccagccgtcccaaaggagcttcctgcccctccagcaccaccacccgcaagtgccccaacgcctgagaaggaacctgaggagcctgcccaagcccctcccgcacagagcacacccactccaggggtcgccgctgcacccactttggttagtgggggaggctccacgagctctacatcatccggctcgttcgaggcttcacccgtggagccccagctgccaagcaaggaggggcctgagccccctgaggaggtgccaccaccgactacacccccagtaccaaaagttgagcccaagggagatggcatcggccctacacgccaacccccatctcaaggtctcggctaccctaagtaccagaagtcgctgccgcctcggttccaacgtcaacagcaggagcagctcctcaagcagcagcagcagcaccagtggcagcaacaccagcaggggagcgcccctcctacaccagtgcctccaagcccaccccaaccagtgacccttggagctgtgccagcgccacaggcacctccgccacctcctaaggcactgtaccccggtgctcttgggagaccccctcccatgcctcctatgaacttcgacccccgttggatgatgatacctccttatgtcgatcctaggcttctccagggcaggccgcctctggatttctatcccccaggggtgcacccttccggactggtaccaagggaacgatccgactctggtggcagtagctctgagccttttgatcggcatgccccagccatgctgcgggaaagaggaacccctccagtggaccccaagcttgcttgggttggcgacgtgtttaccgccacaccagcagaaccgcgacccctgaccagcccactaaggcaagccgcagatgaggacgacaagggcatgagaagcgaaactcccccagtccccccaccccctccttatctggcatcataccccggatttcccgaaaatggggctcccggtcctccaatcagccggtttcctttggaggagcccggtccccgtccgctcccttggcctccaggctccgatgaggtcgcgaaaatccagacaccaccacctaagaaggaaccccctaaggaggagacagcacaattaactggtccagaggcgggacgcaagcccgcaaggggagtaggctccggtggacaaggtccaccccctccgagacgcgagtccagaacggaaacacgctgggggcctcggccaggatcaagcaggcggggaatccctccagaagagcctggcgctccgccaagacgggcaggacctatcaagaaacctcctccacccacaaaggtggaggagctgcccccaaagcctcttgagcagggcgatgagacccctaaacctcccaaaccggacccgctcaagattactaagggtaaactcgggggtccaaaggagaccccacccaacggcaacctctcccccgcacccaggctgaggcgtgactactcatacgagcgagtgggccctaccagctgcagaggcaggggtagaggggagtatttcgccagaggacgcggttttaggggcacatacggcggaagaggtcgtggggctcggtcaagggagttcaggagttaccgagaattccggggagatgacggcaggggcggagggaccgggggacccaatcatccccctgccccacgcggtaggaccgcctccgaaactcgctctgaaggaagcgagtatgaggaaatcccaaagaggagacgccaaagagggagtgagactggctctgaaacacacgagtctgacctggcgccatcagacaaggaggcccctacgccgaaggaggggacactgacccaggtgccattggccccacccccaccgggtgccccaccaagtcctgctcccgctcggttcacggcaaggggtggccgtgtctttactcccaggggcgtgccgagccggcgagggaggggaggaggtcggcctccccctcaggtttgcccaggctggtcccctccagccaaaagtctagcccctaagaaacccccaacaggcccactacccccaagcaaagagccgctaaaggagaaactaattccgggacctctctccccagtggcccgtggaggaagcaatgggggatccaacgtgggcatggaggacggagagcgcccacggcgaaggcgacacggccgagctcagcagcaagacaaaccccctcggtttcgcaggcttaaacaagagcgcgaaaacgccgcaaggggttcagagggtaagccatccttaaccctccctgcaagcgctcccggacctgaagaagcgctcactacggtaacagtcgccccagccccaagacgtgccgcagccaagagcccggatctcagcaaccagaacagtgatcaggctaacgaagagtgggagacagcgtccgagtccagcgatttcacatcagagaggcggggagataaagaggccccaccacctgttctgttaacacccaaggctgtcggaacacctggaggtggcggtggaggtgccgtccccggaatctcagctatgtcgcggggagatttatcccagcgggcaaaagacttatccaaaagaagtttcagttctcagcggccaggcatggaacgccagaaccggagaccaggcccagggggaaaggctggttcttcaggatcgagttccggaggcggaggcggtggtcctggcggacgaaccggtcctgggaggggagacaagcgaagctggccctcccctaagaacaggtctcgtccccctgaggagcgcccacccggactaccacttccccctccgcctcccagttctagtgcggtgtttcgcttggatcaggtgattcactctaacccggctggaatccagcaggccctggcccagctttcatccagacagggtagtgtcacagcccctggagggcatcccaggcataagcctgggcctccacaggctccacagggtccttctccacgcccacctactagatacgagccacagcgtgtcaacagcggtttgagcagcgacccccactttgaggaaccagggccaatggtccgcggagtcggtgggaccccgagggatagcgcgggtgtgtctccatttccacccaagagacgtgaacgaccacctaggaagccagaattacttcaagaggagagcctaccccctccacattcttccggttttctcggctccaagcccgaggggcctgggccacaggccgagagtagagacacaggaaccgaggctcttacgccccatatctggaataggctgcacacagccacgtcaagaaaatcctaccgaccttcaagtatggagccctggatggagcccctaagcccattcgaagacgttgccggtacagagatgtcccagtccgatagcggggtagacttgtctggcgacagtcaggtatcgagcggaccttgtagccagaggtctagtccagacggcggactgaaaggagccgctgagggacctcccaagcgccctggcggttcatctcccttgaatgccgtcccctgcgagggtcctcctgggagcgagccacctcgaagacctccacccgctccccacgacggcgatcggaaagagctacccagagagcaacccctcccacctgggccaattggcactgagcgatctcagcgcacggatcggggaaccgagcccggaccgattagaccctcccaccggccaggccctccggtgcaatttggaacatccgacaaggattcggatctcaggttggtagttggcgacagcctgaaggcagaaaaggagttaaccgcctccgttactgaggcaatcccagtgtcaagagactgggagttgctgccctcagctgccgctagcgccgagcctcagagcaaaaatctcgacagtgggcattgcgtgccagagcccagttcctccggccaacgtctttatccagaggtgttctacggttctgctggacccagtagctcccagattagtggaggcgctatggactcacagttgcaccccaactcgggagggttcagacccggaaccccatctctccacccatataggtcacagcccctgtacctccctccgggaccagcaccaccatctgcattgctcagcggggtcgcattgaagggacagttcctagacttctccactatgcaagcaacagagctgggtaagctgcccgcaggaggcgttctctacccaccccctagctttctgtattctcctgccttctgcccctcacccctgccagacaccagcctcttgcaggtacggcaggaccttccctcgccaagcgatttttacagcaccccgttgcaacctggtggacagagcggattcctgcctagtggagctcctgcacagcagatgcttctgcccatggttgactcccaactaccagtggttaatttcggttctctgcccccagctccccctcccgctcctccaccgctaagccttctccccgttggcccagccctccagcctccatccctcgccgtgcgccctccaccagctccagcaacccgtgtattaccctctcccgcacgcccattccccgcaagcctcgggcgagcagagctgcatcctgtcgagttgaaacctttccaagactaccagaagctcagtagtaatctgggcggacctgggagcagccgtacgcctcccactggaaggagcttcagtgggcttaatagtcgcctgaaagctacaccctctacttacagcggggtcttcagaacccagagggtcgatctgtatcagcaagcttccccccctgatgccctccgctggatccctaagccctgggagaggactgggccaccgcctcgagaagggcctagcaggagagctgaggagcctggctccagaggagataaagaacccggtctgccccctcctcgcta

SEQ ID NO: 345143 - DNA, 6473 bp, Artificial Sequence
  derived and/or modified sequence
atgagcgatcggagtggcccaacagccaaggggaaagacggtaagaaatactcatctctgaacttattcgatacctataagggaaagagcttggaaatccagaagcctgcagtggcaccacggcacggcttgcagtctctggggaaagtggccatcgctagaagaatgccaccgccagctaacctaccttcactgaaggccgaaaacaagggcaatgatcccaacgtttcccttgttcccaaggacgggacaggatgggccagcaagcaagaacaaagcgatccaaagtctagcgacgcttccaccgcccagcccttggagtctcagcccctgcccgctagccagaccccggcatctaaccagcctaaaagacccccagctgccccagagaataccccactcgttccctccggagttaaaagctgggcccaggcctctgtgacccacggggcacacggggatggaggccgtgccagtagtctcctttcgaggttctctcgggaagagttcccgaccttacaggccgcaggagaccaggataaagcggctaaagaacgagagtctgccgaacagtctagcggccctggaccctcacttcggccacagaattccaccacatggcgcgatggaggtggaaggggccctgacgaacttgagggacctgacagcaagctccaccatggacacgatcctcggggtggactgcaaccttcaggccctcctcagtttcctccctaccggggaatgatgcctcccttcatgtacccaccgtacctgccattcccccctccttatgggccacagggcccttacagatacccaacccccgacggtccgagcaggttcccaagagtagcaggaccgcgaggttcaggtccacccatgcggttggtggaacctgtcgggcgaccatctattttaaaagaagacaacttgaaagaattcgaccagttggaccaggagaatgatgatgggtgggcgggagcacacgaggaggttgactacaccgaaaaacttaaattcagcgacgaagaggatggtagagacagcgacgaagagggtgctgagggccaccgcgactcacaatctgccagcggtgaggagaggccacctgaagcagacggtaaaaaaggtaactcaccaaacagcgagccgcctaccccaaagacagcttgggcggagactagccgtcctccagagactgagccagggcctcccgcacccaagcctcccctgccgccacctcaccgcggtcccgcaggcaactgggggcctcctggcgattaccccgaccgaggcggaccgccatgtaagcctcccgctcccgaggacgaagacgaagcctggcggcaacgaagaaagcaatcctcatcagaaatctccctggcagtagaacgcgctcggagaagacgcgaagaggaggagcgacgaatgcaggaggagcggagagctgcttgtgctgaaaagctgaagaggctcgacgagaaatttggggcacctgacaagcgactgaaagcagaacccgctgcgccaccggctgcgccaagtaccccggcaccccctcctgcggtacccaaagaactccctgctccacccgctccacctcccgcttcagcacccactcctgagaaggaacctgaggagccagcccaggcgccaccagcccagagcactcctaccccaggtgtggcggcagcaccaaccctggtgtccggcggaggttctactagttccaccagtagcgggtctttcgaggctagccccgttgagccccaactgccatccaaagaggggccagagcctccggaggaagtaccaccccctacaactccacctgtcccgaaggtggaaccaaaaggggacggcattgggcctacccggcagccgccttcacaaggcctggggtaccctaagtaccagaagagccttccgccacgcttccagagacagcagcaggaacagcttctgaaacagcagcagcaacaccagtggcagcaacaccagcagggcagtgcaccacccactcctgtgcctccgagtcctcctcagcccgtgaccctcggcgcagtacccgctcctcaagcccctccccctccgccaaaagccctatatccaggggctctgggtcgcccaccccctatgcctccaatgaatttcgacccacgctggatgatgatacccccatatgttgacccacgactgctccagggccgtccacctttggacttctacccgccaggcgtgcatccatccgggttagttccacgggaaaggagcgattcaggaggctccagcagcgaaccgtttgaccgccatgctcctgcaatgctccgggagagaggtacacctcccgtggacccaaagctcgcgtgggttggagacgtcttcactgccactcccgcagaaccccgtccgttgacatcccccttaagacaggctgccgatgaggacgataaggggatgcggtccgagacccccccagtgccgccaccaccgccttacctagccagctaccctggattccccgaaaacggtgcccctggccctcctatctcaaggttcccactcgaagagcctggtcccaggccactgccttggccacccggatccgacgaggtcgcaaagattcagaccccccctcctaaaaaggagccccctaaagaagagaccgcccagctcacaggacccgaggccggacgaaagcctgcaagaggagttggcagcggaggccagggtccccctccacccagacgagagagccgcacagagacacggtggggaccacgacccggtagttccaggaggggaattcccccagaggagcccggagccccaccgagacgcgctggcccaattaagaagcccccacccccaacaaaagtggaagagctcccaccaaagcctctggaacagggagatgagacgcccaaacctccaaaacccgaccccctcaaaatcacaaagggcaaattgggtggccctaaagagacccccccaaatgggaacctcagccctgcccctaggctgagaagagattattcttacgagagagtgggcccaacatcttgccgcggaaggggtcggggagagtacttcgccagggggagggggtttagggggacatacggcggaagggggaggggcgctcgctcaagagaattccgatcttatagggaatttaggggcgacgatggcaggggagggggaacaggcggtcccaaccatccacccgctcctcggggacgtaccgcctcagagacacgcagtgagggctcagagtacgaggaaatcccgaaaaggcggagacagaggggctctgaaacaggctccgaaacacacgaaagcgatctggcaccgagcgacaaagaggccccaaccccaaaggaaggaaccctcacacaggtgcctttagccccaccgcctcccggagcccctccgtctcctgccccagcacgctttacggccagaggcggtcgggtgttcactccgagaggagtgcccagtcgccgtggcaggggcggtggcaggccacccccacaggtgtgtcctggctggtctccccctgcaaaatctctggctcctaaaaagcctcccaccggacctcttccaccaagcaaggagcctttgaaggagaagcttattcctggccctctttcccccgtggccagggggggtagcaacgggggaagcaacgtgggaatggaggatggcgagaggccacggaggaggcggcatggacgggctcagcagcaggacaaaccccctcgcttccgacgactgaagcaagaacgggagaacgctgccagaggatccgagggtaagccaagcctcaccctgccagcttccgcccctgggccagaggaagcgctgactacagtgaccgtggctccggctccacgcagagccgctgcgaaaagtccagatctgtccaaccagaactcggaccaggcaaatgaggagtgggagaccgcctccgaaagctccgacttcacttctgaaagaaggggagacaaggaagccccaccaccggtgcttttgacccctaaggcggttggcactcccggtgggggagggggaggagccgtccccggaatttccgctatgagccgtggcgacctgagccagcgggctaaagacctctccaaaagatccttcagctctcagcggccaggtatggagcggcagaatagacgacctggcccaggaggtaaagctggatcctccgggtcgagctcaggtggaggaggagggggaccaggtggtcgaacaggaccgggacggggtgacaagaggtcttggccgagccccaaaaatcgatctcggccacctgaagagcgtccgcctgggctccctctgcctccccctcccccaagttccagtgccgtcttcagattagatcaggttattcactctaacccggctggcatacaacaggccctggcccagctgagttctcgccaggggagtgtgactgcccctggcggacacccacggcacaagcctggacccccacaggcccctcaggggccttctcctcgcccacccacccggtacgagcctcagcgtgtgaacagcgggctaagtagcgatccacattttgaggaaccaggacctatggttaggggtgtggggggaaccccccgtgattctgcaggggtatccccatttccaccaaagcgcagagaacgtcccccacggaaacccgaattactgcaggaggaaagtcttcccccaccccacagctctgggttcttgggatccaaacctgaaggacctggaccacaggctgagtccagagataccggcaccgaggctctcacaccccatatttggaatcgcctccacactgcgacttcccgtaagtcctatcggcctagttccatggagccctggatggagcctctgagtcctttcgaggacgtggccggaactgagatgagccaatctgacagtggcgtcgatttaagcggggatagccaggtaagtagtggaccatgttcacagagaagcagccccgatggcggtctgaaaggtgctgctgagggacctcccaaacggccagggggtagttcgccactcaatgcggttccttgcgaaggccctccaggaagcgagcctccgagaaggcctccgcctgcccctcacgatggggatcggaaagaactccctcgcgaacagccgttaccgccaggcccaatcggtacagagaggtctcagaggacagacaggggtaccgagccgggaccgatccggccatcccacaggcccggtcccccagtccagttcgggacctctgacaaggattctgatctccgcctggtagtaggcgactctctcaaggctgagaaggagttgacggcctcggtgacggaagcgatacccgtgagcagggactgggaactgctacctagtgccgctgctagcgccgagcctcagtctaagaaccttgatagtggccattgcgttcccgagccaagctccagtgggcaacggctttatccagaggtattttacggctcagcgggacccagctcctcccagatcagcggcggagcaatggattcacagcttcaccctaactctggtggattccggccaggcactccaagtctgcatccttacagatcacagcctctgtaccttccgccaggacctgcaccgccatcagcgttattgtctggcgtcgcactcaagggccagttcctcgacttcagtaccatgcaggcaaccgaactcggcaagctgccagccggtggagtgctctacccaccgccaagctttctatattcaccagctttttgtccctcacctcttccagacacatcactgcttcaggtcaggcaggacctccccagcccgagcgatttttacagtactccgctccagcctggcggacagtccggattcctccccagtggcgcacctgcacagcagatgcttctgccgatggtggattcacagctgccagtcgttaacttcgggtcgctcccccctgcgccacctccagcacccccaccactttcactcctcccagtgggtcctgcacttcagccccctagtctcgctgttcgaccacctcccgctccagctacccgcgtcctgcctagccccgcacggcctttcccagcctccctgggaagggctgagctgcatcccgtggaactaaagcccttccaagattatcaaaagttgagcagcaatctgggaggcccaggttcgtcacgcacccctcctaccggtagatcattcagcgggttgaatagtcggctaaaggcaaccccctcgacctattctggggtctttcgcacccaacgggtcgacttgtaccagcaagcctccccgccagatgccttgcgctggatccctaagccatgggagaggacaggaccaccacccagggagggaccgtccaggcgggcagaagagcccggtagtcgtggggataaagaaccaggtctgcctcctccacggta

SEQ ID NO: 345144 - DNA, 6473 bp, Artificial Sequence
  derived and/or modified sequence
atgagcgaccggtccggacccaccgcaaagggaaaggacgggaaaaaatactcttcgctgaatttattcgatacctacaagggcaagagtctggaaattcagaagcctgctgttgcccctcgccacgggctgcagtctctgggcaaggtggcaattgctcggaggatgcccccacccgcaaatcttcctagtctgaaggcagagaacaagggtaatgacccgaatgtttccctggtccctaaggatggaactgggtgggcatcaaaacaggaacaatctgaccccaaaagtagtgatgcctcaaccgcccaacccccagagagtcagcctctgcccgcatcgcagacacctgccagtaatcaaccaaagagacctccagctgcccctgaaaatacgccacttgtcccgtccggtgtgaaaagctgggcacaggcttctgtgacccatggggcacacggcgacgggggaagagcgtctagccttctttctaggttctcacgtgaagagttcccaacgctgcaggccgctggggatcaggacaaagccgctaaggaacgcgaatccgccgagcaatccagtggccctggacctagccttcgcccacagaatagcacaacttggcgagacgggggaggcagagggccagatgaactggagggacccgactccaagctccaccacggacatgatcctcgtggcggtttgcaaccttctggtccgccacaatttcctccgtaccggggaatgatgccgccttttatgtaccccccatacctgcccttccccccaccatatggtccacagggtccctaccgctacccaactccggatggcccttcacggtttcctagagttgctggtcctcgagggtctggccctcccatgaggctggtggaacccgtgggaaggccttcaattctcaaagaggataacctgaaggaattcgaccaacttgatcaggagaatgacgacggatgggcaggagctcatgaggaggtagactacaccgagaagctaaagttctcggacgaagaagatgggagggatagcgatgaagagggagcagaggggcatagggactctcagtctgcttccggggaggaaaggccacccgaagccgacgggaaaaaggggaatagtccaaactccgaaccacccacgcctaagactgcctgggcagagaccagccggcctcccgaaaccgaacccggacccccagcgcctaaacctccactgccaccaccacaccggggtcccgcaggaaactggggtcccccaggtgactatcctgacagaggcggtcccccttgcaaaccacccgctcccgaagatgaagacgaagcctggcggcaacgtcgcaagcagtctagcagcgagatctcgttggccgtggaacgcgcacgtcgcagaagagaagaagaagagagaagaatgcaagaggagagaagagcagcctgcgctgaaaaactcaagcggctggatgagaaattcggcgcacccgataaaagactcaaagctgagcctgcagctcctccagccgctccctctacccctgcacccccacccgctgtgcccaaggagctccctgcgcctcctgcaccgcctcccgctagtgctcctacacctgagaaggagcccgaggaacctgcccaggctccaccagcgcaatcgacccccacccccggagtggcagcagcccctacgttggtatcaggcggaggttcaacttcctctacttcttccgggagttttgaggcaagccccgtggaaccacagttgcctagcaaggagggtccggagccccctgaagaggtcccccctcctacaacacctccagtgcctaaagtcgaacctaagggggacggaatcggccctactcgccagcctccttcacagggtttgggttaccctaaataccagaagagcctcccacccagatttcaacggcagcaacaggagcagctgttaaaacagcaacagcagcatcaatggcagcaacatcagcagggtagtgcccctccaacacccgtgcccccttctccccctcagcccgtaactcttggtgctgtcccagcccctcaggctccaccacccccacctaaggctctgtatcctggtgcactcggcaggcctccgccaatgccacccatgaactttgaccccaggtggatgatgattcctccctatgttgatcctcggctgttgcagggacggccacccctggatttctatccacctggggtccatccctccgggctcgttccgagggagagaagcgacagcggaggttcctcgtcagagccattcgatcgccatgccccagcaatgctccgcgaacgcggtacgccacctgttgatccaaagctcgcttgggtgggagacgtgtttaccgcaacccccgctgaacccaggcccctgacctctcccctgcggcaggcggctgacgaagacgacaagggtatgcgcagtgaaactccccctgtccctccaccacccccttacctggcttcttatccgggattcccagagaatggagcaccaggtcctcctatttcccggtttccactggaggagcccggtcctagacctctgccctggccgccaggatccgatgaagtggctaaaatccaaactcctcccccaaagaaagagcccccaaaggaggaaacggcacagctcactggccctgaggccggaaggaagcccgctcgcggagtgggttctggtggccaagggcctcccccacctcgtagggagagcagaaccgagacccggtgggggccacgtccgggatcgagtcggagagggattcctcccgaggagccaggagcaccacccagaagggccggtcctattaagaaacctcctcccccaactaaggttgaggagttgccccctaaaccgctggagcaaggcgacgaaacccccaaacctcccaagcctgacccacttaagattacaaaaggaaaactgggcggacccaaggaaacaccgcctaatgggaatttaagtcctgcacctagactgcgccgtgattactcgtatgaacgcgtgggaccgacatcatgccgcggacgcggaagaggcgagtattttgccagagggaggggcttcagagggacttatgggggacggggacgcggagcacgcagccgggaattcagaagttacagggaatttaggggggatgatggacggggtggtggcaccggcggacccaaccaccctcccgctccacgcggtcgaactgcttcggaaacccgaagcgagggatcagaatacgaagaaatacccaagagacgcaggcagaggggatctgaaaccggatccgagacccatgagtccgatctcgctccttcagacaaagaagccccaacacccaaggaggggaccctcacacaggtgccccttgcccctcctccaccgggagctcctccaagtccagcacccgctaggtttaccgccaggggcggaagggtgtttacaccaagaggagttccctctcggagaggcagaggcggtgggcgaccaccaccgcaggtgtgtcccggatggtcaccgcctgccaagtctctggctcccaaaaaaccaccaaccgggcctttaccgccatctaaggagccactgaaggagaaactaattccgggacccctctcgccagtggcgcgaggaggttctaacggaggcagtaacgtggggatggaagatggtgagcgccctcgacggcgaaggcacggacgggcacagcagcaggataaaccaccccgtttccgacgcctgaaacaggagcgtgagaatgcagcaaggggcagtgagggaaagcctagcttaaccctccctgcgtcagcacctggccctgaagaggccctgactacagtgaccgtggcacccgctcctagaagagctgctgccaagtcgccagatctcagtaatcagaattccgatcaggccaatgaggaatgggagacagcttccgagagctcggatttcaccagcgagcggaggggtgacaaagaagcacctcctccagtactgcttacaccaaaagctgtgggtacgccgggaggcggagggggaggggctgtgcccggaatcagcgccatgtcgcgtggggatctcagtcaacgcgcaaaggatctgagtaagaggagcttcagtagccagagacctggcatggagcggcagaaccgtagacctgggccaggcggaaaggctggatcttccggctcgtcatccggaggtggcggaggcggtcccggtggcaggaccggaccgggaagaggagataagaggagttggccgagcccaaagaatcggagccggccaccagaggaaaggccccctgggctgccactgcccccacctccgccttcctcgtccgcagtcttccgcctcgatcaagtgatccattccaatccagccggaatacaacaggccctggcccagctgtcctcgcgccagggaagcgtgaccgctcccggaggacatcctcggcacaagcctggcccaccacaggcaccccaagggccatctccaagaccccctacccgatatgaaccacagagggttaactccgggttatcaagtgaccctcatttcgaggaacctgggcctatggtcaggggggtgggcggtactcctagggactccgcaggagtctctccattcccacctaagagaagagaaaggccaccccgaaaacccgaattgctgcaagaagagtctcttccccctccccattcaagcggctttttgggtagcaaacccgagggtccgggaccccaagctgagagtcgggacacggggacggaggccttaaccccccacatctggaaccggctgcacacagccacctccaggaagtcttaccggccttcatccatggaaccatggatggagccgctttccccattcgaggatgtagcgggaactgaaatgagccagtctgactctggagtggacctcagcggtgacagccaggtctcatctggaccctgctctcagcgcagctcgcccgacggcggtctcaagggggcagccgaaggaccgccaaaacgccctgggggaagctcaccactgaacgccgtgccctgtgaagggccacctgggagcgaacctccacgcaggccacctccagcaccacacgacggggaccggaaggaactgccgagggagcagccactgcctcctgggccaatcggcactgaacggagtcagcgcacagacaggggaaccgagcccggaccaatcagaccttcacacagaccaggccctccagtgcagttcggtacctcagataaggacagcgatctgcgtctcgttgtaggcgacagtctcaaagccgagaaagaacttaccgcaagcgtgaccgaggctatccctgtctctagagattgggagctattgccaagcgccgcagccagcgctgagccccaatccaagaatctggattctggacactgtgtccccgagccatcctctagcggacagagactctacccagaggtgttctacggctcagcagggccttcttccagtcagatctccggaggcgcaatggactcacagctgcatcccaacagcgggggattccgtcctggaactccatcactccacccctaccgatcacagcccctctatttgccaccaggacctgcaccccctagtgctctgctgagcggcgtagcgctcaaaggtcagtttcttgacttttcaacaatgcaggccactgagttggggaaactgccagcaggcggagtgctgtacccacctccgtcttttctgtactcccccgctttctgtccctcgcctcttccggacacgtcacttttgcaggttaggcaggatttaccaagcccgtccgacttttactctacaccactgcagccaggaggacagtccggattcctgcctagcggcgcaccagcccaacagatgctgctgccgatggtcgacagccagctgcctgttgttaatttcggttctctacctccagctccccctcccgcacccccacccctttccttactgcccgtcggccctgctctgcagccacctagcctggctgtcaggccacccccagcgcctgccacaagggtgcttccatccccagcccgaccttttcctgcctctctggggcgagctgaactgcaccccgtggaactgaaaccattccaagattatcagaaactgtctagtaaccttggtggacctggatcaagtaggacaccacccactggccgatcgttcagcggcctgaatagccgactaaaggctacccccagcacttattcgggcgtattcaggacgcaacgagtcgatctgtaccagcaggctagcccacccgacgctcttcggtggatccctaaaccatgggaacgaactggccctcccccacgtgaaggtccttcccgcagagcagaagaacccggtagtcgaggcgataaagaaccgggactccctcccccacggta

SEQ ID NO: 345145 - DNA, 6416 bp, Artificial Sequence
  derived and/or modified sequence
atgagtgaccgcagtggcccaactgctaaagggaaagatggtaaaaagtactcctcgctcaacttgttcgacacatacaagggtaagtccctggagatacaaaagccagcggtggcccctagacacggcctgcaatcactggggaaggttgccattgctaggcgaatgccacctcctgcgaacctgccttctctgaaagcagaaaacaagggaaacgatcccaacgtctctctggtgccaaaggacgggaccggatgggcgagtaaacaggaacagagcgaccccaaatcatctgatgctagtaccgcacagccccttgagagtcagccgctaccggctagccagacacctgcttccaaccaaccaaaacgccctcccgctgcgccagagaacacgccacttgtcccatccggtgtgaagtcatgggctcaggcctctgtgacccacggcgctcacggtgacggcggaagggccagttcgttgttaagcagatttagccgggaagagtttccgacgctgcaagctgctggggaccaagataaagcggctaaggaacgcgaatccgctgagcagagtagtgggcctgggccaagcctgagacctcagaatagcacaacgtggcgtgacggcggaggccgtgggccagacgagctagagggcccagactccaagctgcatcacggccatgacccacgcggtggactgcagcccagcggaccccctcagttccccccttaccgcggtatgatgccaccgttcatgtacccaccatacctgcccttcccacccccatacggaccgcaggggccttatagataccctacaccggacggcccatcccggttccccagagtcgctgggcctcggggaagcggccctccaatgcggttggtggagccagtggggcgaccgagcatcctaaaggaggacaatctcaaagaatttgatcagttggaccaggaaaatgacgatggttgggccggtgcccacgaggaggtcgattataccgagaagttgaaatttagtgacgaggaggacgggcgtgactctgatgaagagggcgcagagggacaccgcgattcccagtccgctagcggcgaggagcgacctccagaagctgatggaaaaaagggtaactccccgaacagtgaaccccctacaccaaaaaccgcttgggcagaaacttctcgcccacccgaaactgagccagggccacctgcacctaagccccctttgccccctcccggtgattatcctgacaggggaggcccaccctgcaagcccccagcccctgaagatgaagatgaagcttggcggcagagacgtaaacagagcagttccgaaatcagcttagccgtcgagcgcgcacgcaggcggagagaagaggaagagcgcagaatgcaggaggaacggcgagccgcttgcgccgagaaactgaagaggctggatgaaaagtttggcgcaccggataaacggctcaaagcagagccagctgcccctcctgctgccccttccactcctgctccgcctcccgctgtccctaaagaattaccagcccctccagcaccgcctcccgcatccgctccaacacctgaaaaagaacccgaagaaccagcgcaggccccaccagcacagagtacaccgacgccaggggtggccgctgcaccgacattggtgagcggcggtggatctaccagtagtacaagtagcgggagtttcgaggcgagccccgtcgaacctcagctcccctcaaaggagggccctgaaccgccagaggaggttccgccacctacgactcctcccgtgcccaaggtcgagcccaaaggggatggaattggccctacgcgacagcccccaagccagggcctaggctatcccaagtatcagaagtcactcccgcctaggttccagagacagcagcaggaacaactcctgaagcagcagcaacaacatcagtggcaacagcaccaacagggctctgccccacccacccctgtccctcccagcccaccacagcctgtgactctgggcgcagtgcctgcaccccaggcaccacctccaccccctaaggccctgtatcctggcgcactgggacgtccaccaccgatgcccccaatgaacttcgaccccaggtggatgatgatcccaccctatgtcgatccgcgactgctgcaaggtcgccctccgctcgacttctacccacccggagttcatccttcaggactggttccgagggagcgctcagattcagggggaagttcctcagagccattcgaccggcacgccccagctatgctgagagagcggggaactcccccagtcgacccgaaactcgcctgggtgggggatgttttcacggccacacccgctgagcctcgacccttgaccagtcccttgcgacaagccgctgacgaggatgacaaaggcatgagatccgagacgccacctgtgccacccccacctccatacctggcgagctatcccggatttccagaaaatggagcccctgggcctcccatttcgcgcttcccactcgaggaacccggacctcgccctctaccatggcccccagggtctgatgaggtggccaaaatacaaacacccccaccgaagaaagagccaccaaaagaggaaacagctcagttgactggccctgaagcaggtaggaaaccagcgcgtggcgtcgggtcgggaggacagggcccaccaccccctcggcgagagagtagaactgagacacgatggggcccacggccaggctcttcccgtagagggattcctccagaagagccaggagcaccaccccgaagagccggacccattaaaaagccacccccaccaactaaagtggaagagctgccccctaagccattggaacagggcgatgagactcccaagccgcctaagcctgacccactgaaaataacaaagggcaaattgggtggacctaaggagactcccccaaacgggaacctttccccagccccacggcttaggcgcgactattcatacgaaagggtggggccaacaagctgcagaggcaggggtcgaggggagtatttcgccaggggacggggattccggggaacgtatggtgggaggggcaggggcgcagccggtaattccgccgtgacagagagttttgaggaaatgatgggcgttgaggtgggccagggggaccagaccactctgctgctcccggaagctgctctacctgcacggcatggagcccgagtgcagtcaatgcgcaagagcccctcaggagcgggaagcggggctcagaaacaggccgctcggcctatgagggtgatttggcttctccagaccagaagactcccacatccgagacgcgagcactcaccacgaagtcgctccccaacaacacggtcccctacttttcccgctcctgctcgtttcactcccggagtgggggaaagtagtcttcccgaaggcatttcccccggaccaaggaggagggagcctccacaggtgtgtcccggttggtccccccctgctaagtcactcgctcctaagaaaccgccaacaggacctttgcccccttccaaagaacccttgaaagaaaagctcatccccggtcccctgtcccccgtggctcggggtggctccaatgggggaagcaacgtcggcatggaagatggcgaaaggccccgacgcagacggcatggcagagcccaacagcaggacaaacctcctaggttccggaggctcaaacaggagagagaaaatgccgctagaggctcggaaggcaagccttccctgactctgcccgcttccgcccctggtccggaggaggctcttaccaccgtgaccgtcgcgcctgcaccccgtagggctgcagcgaagagcccagatctctccaaccagaactcagaccaggccaatgaggagtgggagactgctagtgagagcagtgacttcacaagcgaaagacgcggagataaggaagcaccccctcctgtgctgcttactcccaaggccgtgggaacaccaggaggcggaggcggaggggcagtccccggaatctccgctatgtctagaggtgacctgtctcagagagctaaagatttgtctaagaggtcgttttctagtcaacgccctggcatggagagacagaaccggcgtccgggaccagggggtaaagctggcagctctggctctagtagtggcggaggtggaggaggaccaggcggtcgtacaggacctggccgaggcgacaagcggtcctggccttcgccaaaaaatagatcaaggccgccagaggagaggccacctggcttgccgctgccacctcctcctccgtcctcctccgcggtttttaggctggaccaggtgatccacagtaatccggctggaatccaacaggccctcgctcagctgagcagcaggcaagggtccgtgacagccccaggcggacacccaaggcacaaacctgggcctccgcaggccccacaggggcctagtcccaggcctcccactcgttacgagccacagagggtgaactctgggctctcatcagatccgcacttcgaagaacccggtcccatggtgagaggcgttggcggaacaccaagggattccgcaggagtctctccttttcctcccaagcgtcgggagaggcccccacgtaagcctgaactgctgcaggaggaaagcctccccccaccacattcttcggggtttttaggctccaaacctgaagggccaggccctcaggccgaatctcgggacaccgggacagaagcactgaccccacatatttggaacaggctgcatactgctacaagtaggaaatcataccggccttcttctatggaaccttggatggaacctctgtcccccttcgaagacgttgcgggtacagagatgtcccagagcgattctggagtggacctctccggtgatagtcaagtgtcttcaggaccatgttcacagcggtccagccctgatggaggtctgaagggcgctgccgagggccctccgaagaggccaggaggatccagtcccttaaacgcggtcccttgtgaggggccaccaggatctgaacccccacggagaccacccccagcccctcacgacggcgaccgcaaagaactccccagggagcagcctcttccccctggtcccatcggaaccgaaaggtcccagagaaccgatagaggcacagagccaggacccatcagaccctctcatcgtccaggtccaccagtgcagtttggcacttctgataaggactctgacctgcgtctcgtcgttggagacagcttgaaggcagaaaaagaacttacggccagtgttactgaggctatccccgtgagtagggactgggagttacttcccagcgccgctgcttccgctgaaccacagtccaagaatttagatagtggtcattgtgtaccggagccctctagctccggacagagactctaccccgaggttttttacggctccgccggtccttcgtcttcgcagatcagcggcggacatgggctctccatcacaagtaagcaatggcgcaggcccggaacacccagcttgcatccttataggagccagccactgtatcttcctccagggccagcgccaccgtctgccctgctgtctggagtagccctgaaggggcagttcttggatttcagtacaatgcaggccaccgaactaggcaagctgcctgcgggtggcgtgctgtatcctccaccgagctttctgtatagcccagcgttctgtccgtcaccgcttccagacacctccttgttgcaggtgcggcaggacttgccaagtccctcagacttctactccacgccgcttcagcccggtggccagagtgggtttctgccctccggagctccagcccagcaaatgttacttcccatggttgacagccaactccccgtggtgaacttcggctccctgccgcctgcgcctcccccagccccaccacctctcagcttgctgccggtggggccagctttgcagcccccatctctggctgtgaggcccccacccgctccggcaacacgtgttctcccaagccctgcaaggccattcccagcttctctgggccgtgcagagctgcacccagtagaactaaagcctttccaggactatcagaagttgagttctaacctcggcggtcctggatccagccgcacccccccaaccggaagaagctttagcgggctgaactctcgccttaaggccactccaagcacatactccggtgtcttcagaacccaacgcgttgatttataccaacaggcctcaccccctgatgccttgagatggattcctaagccgtgggagaggaccggccctccaccaagggaggggccatcacgacgggctgaggagccagggtctaggggggataaggagcccggactcccacctcctcgcta

SEQ ID NO: 345146 - DNA, 6416 bp, Artificial Sequence
  derived and/or modified sequence
atgtcagaccgcagcggccctacagctaaaggcaaggacggcaagaagtactcatcattaaatttattcgatacttacaaaggcaaaagcctggagatccaaaaaccagctgtagccccaaggcatgggctgcagagcctcgggaaagtagccatcgctcggcgtatgccccctccagctaatctgccctccctgaaggcggagaacaaagggaatgaccctaacgtgtctcttgttcctaaggacggcactggatgggcctccaagcaggagcaatctgatccgaaatcatccgacgcctcgactgcccagcctcccgagagtcaacctctcccagcttcccaaacacctgctagcaaccagcccaagaggccacccgctgcaccagagaacactcccctcgtaccgagtggggtcaagtcttgggcccaagctagtgtgacccacggcgcacacggagatgggggtagagcatcctctctgctatcccgcttttctagggaggagttcccgacactacaggcggctggcgaccaggacaaagccgcaaaagagagggaatcagccgagcagtctagcgggcctggccctagtctccgtccacagaacagcacgacctggcgggatggcggaggtagaggacccgacgagcttgagggcccagactccaaactgcaccacggccacgacccaagaggaggcctccagccctcagggccacctcagtttcctccataccgcggtatgatgccacccttcatgtatcccccttacctgcccttcccacccccatatggaccacaaggcccatataggtacccaactcctgacggaccgtcaagattccccagagtggctgggcctcgcggtagcgggcctcctatgaggctcgtcgagcctgttgggcgtcccagcattctcaaagaagacaatctcaaggagtttgatcagctggatcaggagaacgatgacggctgggcaggtgctcatgaagaggtggattatacagagaagttaaagttctcagatgaggaagacggaagagatagtgacgaggagggcgctgagggccatagagatagccaatctgccagcggagaagagagaccaccggaggcagatggaaagaagggcaatagtcctaactcggaaccaccgacacccaaaactgcttgggctgaaacatctcgcccacctgagacagagcctggacctccagcccctaagccaccgctgccaccacccggagattacccagatcgaggtggtcctccctgcaagccgccagcgcctgaggatgaggacgaggcctggaggcagcgaagaaagcagtccagcagtgaaatctctttagccgtggaaagagcccgacggcgacgtgaggaggaagagaggaggatgcaggaagagcggagagcagcctgtgcagagaagctgaaacgccttgacgagaagtttggagcacctgataaacggttgaaagccgagcccgcagccccaccggcagcacccagcacacccgcaccccctccagctgtgcccaaggaactgcccgcaccgccagctcctccgccagcatccgctcccacgccagagaaagagcctgaagagcccgcacaggcccctccggctcagtcgacaccaacccccggtgtggcagctgcccctactttggtatctggcggaggcagcacgtcctccacgtccagcggaagcttcgaagctagccccgttgaaccccagctacccagtaaggaaggccctgagccccctgaagaggtccccccaccgactaccccgccagtgcccaaggtcgaacctaaaggcgacggcattggcccaacacggcagccgccttcccagggcctgggctacccaaagtatcaaaaatccctccctccacggttccagcgacaacagcaggaacaactcctaaaacaacagcagcaacatcagtggcagcagcatcagcaagggtctgcccctccaacaccggtccccccttctcccccacagcctgtgactctcggcgcagtgccagcgcctcaagcccctcctcctcccccaaaggctctgtacccaggcgctctaggacgtccgcctcctatgccccctatgaatttcgacccccgatggatgatgatccctccatatgtcgacccacgactcttacagggtaggccacctctagacttttaccctcccggtgtgcatccaagcggacttgtccctagagaacgcagcgattccgggggtagttcctcagagcctttcgacagacacgcgcctgcgatgctgcgggaacgtggaaccccaccggtagatcctaagctagcctgggtgggggatgtattcaccgcaactcccgctgagcctaggccactgacctcacccctgagacaagccgcagacgaagacgacaaggggatgcggtcagagactcctcctgtgcctcctcctccgccttatcttgcaagctacccaggattccctgaaaacggcgcacctggcccacccataagtcggttccccctagaagagcccggaccgcgacccctgccctggcccccaggcagtgacgaagtggctaagatacagacccccccacccaagaaagagccaccaaaagaggaaaccgcccagctgacaggccctgaagctgggaggaagcctgccaggggggttgggtccggagggcagggacccccaccccctcgacgcgagtccagaactgagacgaggtggggaccccgacctgggtcatccaggcgagggatcccaccagaagagcctggcgctccccctcgtagagcaggacctatcaagaaacccccaccaccgactaaagtggaagaactccctcccaagcctttggagcagggggacgaaaccccgaagccacccaaacctgacccgctgaagatcactaagggtaagctgggtgggccaaaagagaccccccctaacggcaacttaagcccagcacctagactgagacgagactattcctacgaaagggtgggccctacctcctgccggggaagaggtcgcggagaatatttcgccaggggtcgcggtttccgcggaacctacgggggaagagggcgaggcgcagccggtaactctgccgtaaccgaaagttttgaagagatgatgggtgtggaagttgggcagggagatcagaccaccctgcttctcccagaagcagctttgcctgcgagacacggggcacgtgtccagagcatgagaaaatcgcccagtggcgctggatctggcgctcagaagcaggccgctagacccatgcgggtaatatggctcctccagacaaggcgcctgccacatccacgtcgagagcactcaccacggagccggtctcccaccacgcgctccccgacctttcccgcacccgctcgtttcacccctggggttggcgagtcctctctccctgaaggcattagcccgggtccgcgaaggcgggaaccccctcaggtgtgtccaggctggtcaccacccgctaagagcctggccccaaagaagccccctacaggcccactgcctccttctaaagaacctctgaaagagaagctgatacctggccctctgagccctgtggcaagagggggtagtaatggtggtagtaacgtcgggatggaggatggtgagaggcctagaaggaggaggcatgggagagcacaacaacaggacaaaccgccaagattccggcgtctgaagcaggaacgcgagaatgcagctcggggatctgaggggaaacctagcctgaccctcccagcttcagcgccaggcccagaagaggctctcacaactgtcaccgtggcccctgcccctcgcagggccgctgcaaagtctcctgatctgtcgaatcaaaactcagatcaggccaatgaggagtgggaaacagcttctgagtcttccgactttacctcggagagaaggggagataaagaagcgccaccgcctgtgcttctaactccgaaagccgtcggcacgcccggtggtggaggagggggagcagtgccgggtatttccgcaatgtcaaggggagacctgtcccaacgggcaaaggacctctccaagagatcatttagtagtcagagaccgggaatggagcgacagaacaggcgtcccggtcctggtgggaaagcgggatcaagcggctcctcttccggaggtgggggtgggggtcctgggggtcgcacaggccctggaaggggtgacaaaaggagttggcccagccccaaaaatcgttcccggccacctgaggaacggccacctggtctcccgcttccccctccccctcctagttccagcgctgtatttcgcttagatcaggtgattcatagtaatccggcaggaattcagcaggctctggctcaactgagcagccgtcaaggcagtgtgacagcgccaggaggacaccctagacacaagccgggtcctccccaggctccccaagggccaagcccccgtccccctactcggtatgagccacagagagtaaatagcgggctcagttctgatccacacttcgaagagcctggcccaatggtgcgcggagtaggcggaacacccagagactcagccggagtcagtccctttcctccaaagcgccgagagcgtccaccaaggaaaccggagcttctgcaagaggaatctctcccacctccacactcttctgggttcctgggttccaaaccagaaggtcccggaccgcaggcagaatctcgtgacacaggcaccgaagctctgactccccacatttggaatcgtctccacactgccaccagccggaagtcgtatcgcccttcgagcatggaaccatggatggagccactgtcacccttcgaagatgtggccggaaccgaaatgtctcagagtgacagcggtgtggacctgagtggtgattctcaggtgagctcgggaccttgcagtcagcgctcaagccctgacggcggtctgaagggggcagctgaaggccctcccaagaggccaggagggagctctccattaaatgccgtgccctgcgaaggtccacccggttccgagccccctcggagaccccctccagcccctcatgatggggatcgcaaggaactgcctcgcgagcaacccttgccacctggccctatcggaactgagcggagtcagaggacagaccggggtactgaacctggtcctatccggccttcacatcggcctggccctcccgtccaattcggaacatctgataaagactctgacctgcgcctggtggtgggggattccctaaaggcggagaaagagcttacagcttcagtgaccgaggccatccctgtgtcccgggactgggagctgctgccaagcgccgcagcctcggctgagccacaatctaaaaatctcgattctggacactgtgtccccgagccatccagctccggccagagattatacccggaagtgttctatggctctgctggtccttcaagctctcagatctccggcggacacggcctgagcataacatcgaaacagtggcgacgcccaggaacccccagccttcatccgtaccggtcacagccactctacttgcccccaggtcctgcaccaccttccgctctgctatcaggcgtggctctgaaagggcaatttctggacttctctaccatgcaggccactgagctgggcaaacttccagctgggggagtgctatacccccctcccagcttcctctattctccagcgttctgtcctagtcctctgccagataccagtctgctgcaagtccgccaggatctgcctagtccctcagatttctactcaactcctttacagcctgggggacagtcaggattcctgccaagcggcgcacccgcacaacaaatgctgctccctatggtggatagccagcttcctgtggttaacttcggcagcttgcctcccgcaccccctcctgccccaccccctctgtctctgctgcctgtggggccagcactgcagcccccatcactcgccgtgagaccgcctcctgccccagctactcgtgtcctgccttcgccagccagacctttcccagcctcactggggcgagccgaactgcacccggttgagcttaagcctttccaggactatcagaagctgagctccaatcttggcggtccgggatcttctcgcacaccacccacagggaggagtttttcagggttgaactcccgactgaaagccactccttccacttattccggcgtttttcgcacgcagcgcgtggatctgtatcagcaggctagccccccagatgcacttcgatggatacccaaaccatgggagcgcaccgggcctccccctagagagggaccatctaggcgggctgaggagcccggttccaggggagataaagaacccggattaccccctcccaggta

SEQ ID NO: 345147 - DNA, 6449 bp, Artificial Sequence
  derived and/or modified sequence
atgtccgataggagtgggccaaccgccaaaggcaaagacggaaagaaatattcaagtctgaatcttttcgacacatacaaaggaaagagcttggagatccagaagccagctgtggccccacgacatggattgcagtccctcggcaaggttgctatcgcacgcaggatgcctcctccggctaatcttccatccctgaaggctgagaataagggtaatgatccgaatgtcagccttgtgcccaaggatgggactgggtgggcttctaagcaggagcagtcagatccaaagtccagcgacgcttcaactgcacagcctccagaatcgcaaccgctgcctgcatctcagacccccgctagcaaccagcccaagaggccaccagccgcaccggagaacacaccactggtaccaagtggggttaaaagctgggcccaggcgtcagtcacacacggcgctcatggtgacgggggtagggcgtctagcctgttgtcaaggttcagcagggaagagttccccacactgcaagcggctggtgatcaggacaaagctgccaaagagagagagagtgcagagcagagttcaggccctggcccttcactgagaccccagaacagcaccacctggcgcgatggcggtggacgcggacctgacgaattggaaggcccagattctaaactgcaccacggacatgatccaagaggaggacttcagccatcagggccaccccaatttcctccgtacagggggatgatgccaccattcatgtaccccccttacctgcccttcccccctccgtacggcccacaggggccttatagatatcccacacctgatggcccttccaggtttcctcgggtggctggccctcggggaagtggcccaccgatgcgccttgtggagcccgtcggtcgaccttccatcctcaaggaggataacctgaaagaattcgatcagctcgatcaggagaacgacgacggatgggccggtgcacacgaggaagtggattataccgaaaaacttaagttcagtgacgaagaagacgggcgtgattccgacgaagagggcgcagaagggcaccgcgattctcagtccgctagtggcgaagagcggccaccagaggccgatgggaagaagggcaattctccgaattcagagcctcctacccccaagacagcttgggccgagacttccagaccccctgaaacggagcccggacccccagcccctaagcctccattacctccacctcatagaggcccagccggaaactggggccctccgggtgactacccagaccgcggtggccctccatgcaagccccctgcaccagaggatgaggatgaggcctggcgacagagaaggaagcagtcctccagcgaaatctccctggcggtagagagagcgagaaggagacgcgaggaggaggagagacggatgcaggaggaacggagggctgcgtgcgcagaaaagttaaagaggcttgacgaaaaatttggtgctcccgataaacgattgaaggctgagcctgccgctccaccggctgctcccagcacccctgctccacctcccgcagtgcccaaggaactaccggcaccccctgcaccacctcctgccagcgcacctactccagaaaaagagccagaagagccagcgcaggctcccccagctcaaagtaccccgactcccggagtggcagcagccccaactctggtgtcagggggtggcagcacttctagtacgtcatccgggtccttcgaagcgtctccagttgagccccaattgccttccaaggagggcccagagccaccggaggaggtgcctccaccaaccactccccctgtgcctaaagtggagcctaaaggggatggtatcggtcccactaggcagccacctagccagggcctgggctacccgaagtatcagaaatccctgcccccaagattccagcgtcagcaacaggagcaactgctgaaacagcagcaacagcatcagtggcagcaacaccagcagggtagtgctccccctacacccgttcctccaagcccccctcaaccagtgaccctcggcgcagttcctgctccccaagccccacctccacccccaaaggccctgtatcctggcgctttaggcaggccaccccctatgccacctatgaacttcgaccctcgctggatgatgataccaccgtatgtggatcctaggttgctccaaggtaggcctcccctggatttctaccctcctggggtgcaccctagtgggcttgtcccaagagaaagaagcgactccggaggctccagttccgagccgtttgatagacacgcccctgctatgttacgggagagaggcaccccacctgtggaccctaaacttgcgtgggtcggggacgtgtttacggcaaccccagcagagcccaggcctctgacaagtccgttacgacaggctgccgatgaggacgacaaaggtatgcgctctgagacacctcccgtgcctccccctcctccatacctagcgtcatacccaggatttcctgagaacggggcacctggtccacccatcagccggttccccctggaagagccgggaccaaggccattgccgtggcccccaggcagtgacgaagtggcgaaaatccagacaccaccacccaagaaggaacctcctaaagaagagactgcacagctgacaggccctgaagcaggccgaaagcctgcgcgtggagtggggagtggcggacagggccctccccctcctaggcgggaatcccgtacagagacccgctgggggcctagacccggtagctccagacgcggtataccaccggaggagcccggagcaccccctcggagagcaggccctatcaaaaagcctccgcctcctactaaagtcgaagagctgccgcctaagccattagagcagggcgatgagacccccaaaccccctaagcccgatcctctcaagataactaaaggaaagctgggaggacccaaggagacacctcctaatgggaatctgagccctgccccacggctgagaagggattactcttacgaaagagtcggccctactagttgccgagggagaggaagaggcgagtattttgccaggggtagggggtttcggggaacgtacgggggaagaggaagaggtgcagccggtaactctgctgtgaccgagtctttcgaagaaatgatgggcgtagaggtggggcagggagatcagaccaccctgctactcccggaggccgctctgcccgcacgtcatggcgcaagagtccaaagtatgcgtaaaagtccttccggtgccggttctggcgctcaaaaacaggccgctcggccaatgcgggtgatctggctgcttcagaccaggcggctgcctcacccgaggcgcgaacatagtccccgatcccgaagccctacaactcgatcacctacgttccctgctccagcacgctttacccccggagtaggagaaagctcactccctgagggtatttctccgggacccaggcggagggaaccccctcaggtgtgtcccggttggagtccccctgccaaatccctcgcacctaagaagccacctacaggaccactacccccaagtaaggagccactgaaggaaaagttgatcccgggtccactgtctcctgtggctcgaggagggagtaatggaggttcgaacgttggaatggaggacggcgagcgcccacgacggcgacgccacggacgggctcagcagcaagacaagcctcctcgctttcgtcggctaaagcaggaacgcgagaacgccgctcgtggctccgagggaaaaccatctctgaccctgcctgcatccgctccagggccagaagaggcgctgactactgtgacagtggccccagctccacgtcgagctgcagctaaatcaccagacctgtccaaccaaaactcagatcaagcaaacgaggaatgggaaaccgcctcagagagctccgacttcaccagcgaacgcaggggagataaggaagcccctccacccgtgttgctgaccccgaaagcagtgggcacaccagggggaggaggcggaggagccgtgccaggaattagcgcaatgagcagaggggacctatctcaaagggctaaggacctgtccaagagatcattttctagccaacggccagggatggagcgacaaaaccggaggcctgggccaggagggaaagctggaagctcagggtcatcctcaggtgggggagggggtggtcctggaggcagaaccgggcctggcagaggagataagcgctcttggccgtcaccgaaaaatagatcacgcccaccagaagaaagacctccaggcctcccactaccacctccaccaccttcatcttccgccgtcttccgcctggaccaggtcatccattcgaatcccgctggtattcagcaggccttggctcagctgtcgagtaggcaaggatctgtgactgcccctggcggacaccctcggcacaagcccggacctccccaggctccccagggcccatcacccagaccaccaactaggtacgagccccagcgggtgaattcagggctgtcttctgacccccacttcgaggagccaggccctatggtcagaggagtgggtgggactccgcgagattcagctggtgttagccctttcccaccgaagcggcgagagcgccctcccaggaaaccagaactgctccaggaggagagcttgcctccccctcattccagtggtttcctgggctctaaaccagaaggaccagggccacaggctgagagccgcgatactgggaccgaggccttaacaccacatatttggaatcgactgcataccgccacctccaggaagagctacaggcccagttccatggaaccttggatggagccactgtcaccattcgaggacgttgctggcaccgagatgtcccagagtgattctggcgtggatcttagcggcgatagtcaggtcagcagcggaccctgcagccagagatcctcccccgatggcggactcaaaggtgccgctgagggtcctcccaagcgtccgggtggcagcagccccttgaatgccgttccctgcgaaggcccacctggtagtgagccgccaaggaggccccctcccgcaccccacgatggcgacagaaaggaacttcccagggagcaacctctcccccctggacccattggcaccgaacgctctcaacgtaccgatagagggaccgaaccaggcccaatccgaccaagccaccgcccagggccacctgtgcagttcggcacttctgataaggacagtgaccttaggctcgtcgtgggagatagtcttaaggctgaaaaggaactcacagccagcgtgaccgaggctattccggtcagccgggactgggagctgctaccatccgccgctgccagtgccgaacctcagtcaaaaaacctcgatagcggccactgtgtacccgagcccagtagctctggccagcgcttgtaccctgaagtgttttatggcagcgctgggccaagcagctctcagatctccgggggtcacggactctctatcacttccaaacagtggcgccgacctggcacacctagtctgcacccataccggtctcaacccctttatctgccgcctggccctgctcccccatcagcccttttgtcaggggtcgccctcaagggccaattcctcgatttttcaacaatgcaggcaactgagctcgggaagcttcccgctggtggagtgctgtatccgccaccttcctttctctacagcccagcgttttgcccctcaccacttcctgacacttcactgctccaggtacggcaggacctgccaagcccatccgatttctatagcacgcccctgcagcctggagggcagtccggctttctgcctagcggcgctccggctcagcagatgctgctcccaatggttgacagtcaactcccggtcgtgaattttggttctctcccgccagcccctccccctgctcccccacccttatccttactgcccgtcgggccagccctgcagccgccatcactggctgtgaggccccctccggcacctgccactcgggtactgcctagcccggcaagacctttccccgcatcgctgggcagggctgaactccatcccgtggagttgaagcccttccaggattatcagaagctgtcatctaacctggggggtccaggcagctctaggactcctcccactggcagaagttttagtggtctcaacagccggctgaaagctacaccaagtacgtacagcggggtgtttaggacgcagcgcgtggatctgtaccagcaagcaagtccacccgatgctttgcgttggatccccaagccttgggaacgcacagggccacctccccgagagggcccttcccgcagggctgaagagcccggttcccgcggtgacaaggagccgggactgcctccaccccgtta

SEQ ID NO: 345148 - DNA, 6449 bp, Artificial Sequence
  derived and/or modified sequence
atgagcgaccgtagcgggcctactgccaaaggcaaggacggtaaaaaatactccagtcttaatctgtttgatacttacaaaggaaagtcactggaaatacagaaaccagcagtggccccacgccatggactgcagtcactgggcaaagtggccatagcgaggcgcatgcctccaccggcaaatcttccatcgctgaaagcagaaaacaaaggcaacgaccctaacgttagtctggtacccaaggacggtacaggatgggcaagcaaacaagagcagtcggatccaaagagctccgacgcctcaacagcacaacccctggagagccagccactgcctgcttcacaaacccccgcttctaatcagcctaaacgcccaccagccgcacctgagaacacacctctggtgccctctggagtcaagtcctgggcccaagcttcagtcacccacggggctcacggcgacgggggacgagctagcagcttgctcagccgcttctccagggaggagttccccacactccaggccgcaggagaccaggataaggcagctaaagagagagagtccgcagagcagagcagcggacccggaccttcactccgcccacagaactccaccacatggagagatgggggtggaagaggcccagacgagttagagggccctgactccaagctgcaccatggccatgaccctagggggggactgcaaccatccggcccaccccagttccccccatacagaggaatgatgccacccttcatgtatcctccatacctgcctttcccgccaccgtatggaccccaagggccttacaggtaccccacacctgatggaccctccaggtttccaagagtggcaggccctcggggatctggtccaccgatgcggctggtggaaccggtgggcagaccatcaatattaaaagaggataatctgaaagaatttgaccagcttgatcaggaaaacgacgacgggtgggctggcgctcacgaggaggtagattacactgagaaactgaagttctctgatgaagaggacggtagagatagtgatgaggaaggagctgaggggcaccgagattctcaatccgccagcggtgaggagcggccacctgaggccgacgggaaaaagggcaattcccctaattcagaacctccaactcccaaaacggcttgggccgaaacaagccggcctcccgagaccgagcccggaccaccagctccgaagccccctctgccccctccccaccgtgggcctgccggtaactggggccctcctggagactatccagacagaggcggtcccccatgcaagccgcctgcccctgaggacgaagacgaggcatggcgccagcggaggaagcaatctagctccgagatcagtctggccgtggaacgagccagacgccgacgggaggaggaagaaaggcgaatgcaggaagaacgcagggccgcttgcgctgagaagctcaagcggctcgatgaaaaatttggggctccagataagcggttgaaagccgagcccgcagcaccccctgctgcgcctagtactcctgcgccaccacccgcagtgccaaaggagctgcctgctccaccggcaccaccacctgcctccgctccaactcccgagaaggagccagaggagccagcacaggcccctcctgcccagagcactcctactcccggagtcgcagccgctcccaccctggtctcgggtggcggatctacgtctagtacatcttcaggctccttcgaagctagtcccgtggagcctcagttaccttctaaggaagggcctgagccacccgaagaagtgcctccccctactacccccccagtccccaaggtggagcctaagggagacggaatcggtccgacgcgccagccaccaagccagggattaggctacccaaaataccagaagtccctgccaccacgcttccagcgtcagcaacaggagcagctgttgaagcaacagcagcaacatcagtggcaacagcaccagcaggggagtgcacccccaacacctgtcccacccagcccaccacaacctgtaaccctcggagccgtgcccgctccgcaggcgcctcccccacctccgaaagccctataccctggagcccttggacggcctccaccaatgcccccaatgaatttcgatcccagatggatgatgattcccccatacgtggatccacgcttgttgcagggacggccaccccttgacttttatccgcctggagtgcatccttctggactcgtccccagggaacgttctgactccgggggaagcagcagtgagccctttgaccggcacgctccagctatgttgcgggagagaggcactccacccgtggaccctaagctggcctgggttggggacgtgttcacagccaccccagctgagcccagaccacttacgtcccctcttcgccaggctgccgacgaagacgataaaggcatgagatccgaaacgccaccagtcccgccaccgccaccatatctagcctcttaccccggtttccccgagaatggcgcacccggtccgcctatttcaagattccccctagaggagcctgggccacgccctctgccctggccccctgggagcgatgaggttgccaagatacagactccacctcccaagaaggagccacctaaggaagagaccgcacaactcactggtccagaggctggccgaaaacccgctcggggtgtcggctccggcggtcagggtccgccacccccaaggcgagaatctcgcacagaaacgagatggggacccaggccaggcagttcacgccgtggcatcccccctgaagaacccggagccccaccaaggagggccggacctatcaagaagcccccaccgccaacaaaggtcgaggaactgccccctaaaccccttgagcagggcgatgagacccctaagccccctaaacccgatcccctgaaaattacaaaaggaaagttgggcggacccaaggagacacccccaaacggcaatctgagccctgcaccacgcctgagaagggactattcttatgaaagagtaggccctacctcctgtagagggaggggtcgcggagaatattttgccaggggacggggatttcgcggaacttacgggggacggggtaggggagctgctggcaactcagctgtgactgagtccttcgaagagatgatgggtgttgaggtgggccagggcgaccaaacaacattgctcttgcccgaagctgctctgcctgcaaggcatggcgcaagggtccagtccatgagaaagagtccgtctggagctggttctggagctcagaagcaggcagcccgtcctatgcgtgtgatctggcttctgcagactaggcgcctcccacacccacgtcgcgaacactccccacggtctcggtctccaaccacacggtcacctacctttcctgctccagccaggttcaccccaggcgttggcgaaagctccctgccagaggggatcagccccggtcccagacgtagagagccaccccaagtctgccccggttggtcaccaccagccaagtcgttggctccaaagaaaccgcctaccggaccattgccgccaagcaaggagcccctcaaggagaagcttattcccggaccgttgtctccagttgctcgcggtggatccaatggcggaagcaatgtggggatggaggacggagaaagaccaaggcgcagaaggcacggcagggcacagcaacaggataaacctcctagatttagacggctgaaacaggaacgggagaacgcagcgcgtggttccgagggtaagccatccctaaccctccctgcaagcgcccctggacctgaagaggcactgactactgttacagttgctccagctccacgaagagcggcagccaagtctccagatcttagcaatcagaacagcgatcaggccaacgaggaatgggagaccgcttctgaatcctccgatttcaccagtgagcgcagaggggataaagaggcgccaccacccgttcttcttaccccaaaggcagtgggaactccagggggaggagggggaggcgctgtgccaggaatttcggccatgtctcgcggagatctgtcccagcgggctaaagacttatctaaaagaagcttttcctcccaacgccctgggatggagagacaaaaccgcaggcctggtcccggaggtaaggcagggagctcagggagctcttctggaggcggaggaggcggaccaggaggtcgcactggccctggaagaggggacaagagaagttggccatctcccaagaatcgctctcgtcctcctgaggagaggcccccaggcctgcctctcccaccaccccctccttcatcatcagccgtattccggctggatcaggtcatccatagcaaccctgcagggatccagcaagctctcgcgcagctctccagcaggcagggatcagtgactgccccagggggacatccaaggcataaacctgggcctccacaagctcctcagggaccttcccctcgccctccaacgaggtacgagccccagcgcgttaactcaggcttgtcctcagacccccacttcgaagagccaggccctatggttcggggtgtgggaggaacccccagggacagcgctggggtttccccttttcctccgaaacggagagaacgcccacccagaaagcccgagctattacaggaagagagtctgcccccaccacattcatccggattcttggggtccaagccagaaggacctggacctcaagcggagtcccgcgacaccgggaccgaggcacttacccctcatatttggaaccggttacacaccgcgacaagcaggaagagttataggccttccagtatggaaccttggatggagcctctgtccccttttgaagatgtcgctggaaccgaaatgtcacagtcagatagtggggttgacctgagtggagattcgcaagtgtcaagcgggccatgttctcagcgcagctctcccgatggcggactcaagggcgctgccgaggggccacccaagcgtcctgggggatcttcccctctcaacgctgtgccatgcgaaggtccgccaggctctgaaccgccaaggcgcccaccccctgcccctcacgacggagaccgaaaggagctaccacgcgagcagcctcttcctcccggtcccattggcacagaaaggtcccagcgcactgatcgaggtaccgaacctggaccaattaggccctcacaccgaccgggtccaccagtccagttcggtacctcagataaagacagcgacctccgacttgttgttggtgatagcttgaaagccgagaaagaactaaccgcaagtgtgacagaagccatccctgtctctcgcgactgggagctcctccccagtgccgctgcatcagccgagccacagagcaagaacctggattcagggcattgcgttcctgaaccatcaagtagtgggcagcgtctctatcctgaagtcttctacggcagcgcaggcccttcaagtagccagatatctggaggacacggactgtccatcaccagcaagcagtggagacggccagggactcctagtttacatccttacagatctcagcctctgtatctcccacctggcccagcacctcctagcgctctcctcagtggcgtagcgctgaaaggacaatttctggacttctccaccatgcaggcaacggagctgggcaagctcccagccggaggagtgctgtaccctcctccgagtttcttgtactctcctgctttttgccccagtcctctgcctgacacctctctcttgcaggttaggcaggatcttccgagtcccagcgatttctacagcacccccctgcagcctgggggtcagtcgggctttttaccaagtggagctccagctcagcagatgttacttcccatggtcgactcgcagctgcctgtagtgaatttcggatcgctacctcctgcaccaccccctgctcccccacctctttctctcctcccggtcggccctgctctacagcccccaagcctggccgttcgcccacctccagctccagctacacgtgtcctgccttctcccgctaggccgttccccgctagtcttggcagagccgagcttcatcctgtcgagctgaaaccattccaggactaccaaaaactttcctctaacctgggaggccctgggagctctcgcacccctcccaccgggagatctttttccgggttgaatagcaggctgaaggctacccccagcacctactctggggtctttcggacacagagagtggacttgtaccagcaggcttctccacccgatgcgctgaggtggatccccaagccctgggaacgaacagggccaccaccccgtgagggtcctagccgccgtgccgaagagcctgggtctcgaggggacaaggagcctgggctacctccacctcggta

SEQ ID NO: 345149 - DNA, 4149 bp, Artificial Sequence
  derived and/or modified sequence
atgctccgcgagaggggaacacctcctgttgatcccaaattggcctgggttggagatgtgttcaccgccacgccagccgagccgcgtcccttgactagccccctgcggcaggctgcagatgaggacgacaaaggaatgagatctgagacccccccagtgccacctccacctccttatctagctagctaccccggattcccagaaaacggggcaccgggaccgcctatatcccgtttcccattggaagagcccggtcccaggcctctgccatggcccccagggtctgatgaagtggccaaaatccagacaccgccaccgaagaaagagcctcctaaagaggaaaccgctcagctcaccggccctgaagccggacgaaagcctgctagaggtgttggcagcggagggcaaggtccccctcctccgcgaagagaatcccgcacggaaacaagatgggggcctaggcccggatcgagtcggagaggcatacccccagaggaaccgggtgctcccccacgcagagccggtccgatcaaaaagccaccccctcccacaaaggtcgaggaactgcccccaaagccactcgagcagggagacgagactccgaaacctccgaagccggaccctttgaagattacaaaaggaaagctcggtggccctaaggagacccctcctaatggcaatctttcccctgcccctcgcctgcggagagattattcctatgagcgcgtcgggccaacttcttgccggggtcgtggccgaggtgaatacttcgctcgaggcaggggcttccgcggaacctacggcggaagaggcagaggggcacgttctagagagtttaggtcctaccgtgagtttagaggcgatgacggtcggggaggtggcacgggaggccctaatcatccccctgctccgagggggcgtacggccagcgagactcgaagtgagggcagcgagtatgaggaaataccaaagcgaagacggcagcgaggctctgaaaccggaagtgagacccatgagagcgatctggccccatccgataaagaggccccaaccccgaaggagggcaccttgacacaggtgcccctggcaccaccccctcccggagctccccctagtccagcccctgcacgattcaccgccaggggcggaagggtgtttactcctaggggagtcccttcccggagggggcgtggcggaggcagaccaccaccacaagtgtgccccggttggtcaccgcctgcaaaatcacttgcgccaaagaagcctcccacaggccctcttccccctagtaaagagcccttgaaggaaaagctaataccgggacctctctctcccgtggctagaggagggtccaacggcggatctaacgtgggcatggaggatggggaacgcccacgcaggagacggcatggccgagcgcaacagcaagacaagcctccaaggtttcggaggctgaaacaggaacgcgagaatgctgctcgcggaagtgaaggtaagccaagcctgaccctgccggctagtgcccctggccctgaagaggccctgaccacggtgacagtcgcccctgctccacggcgagctgcagccaagtcccctgacctgtctaaccaaaattccgaccaagccaatgaagagtgggagaccgcctctgaatcttcagatttcacaagtgagcggcgaggcgacaaggaggctccccctccagtgctcctgacccccaaggctgtcgggaccccagggggtggaggcggaggcgctgtgccaggaatctccgctatgtctcgtggtgacctttcccaaagggcgaaagatctgagcaagcgttcgttctcctctcagcgccctgggatggaaaggcaaaatcggaggccaggacccggtggaaaagcgggatccagtggatctagctctggcggagggggaggtggcccaggcggacggacaggaccaggcagaggagacaagcggagctggccaagcccaaaaaatagaagccggcctcccgaggagagaccccctggtctgcccttgccccctcctccaccctctagcagcgcggtctttaggctggatcaggttattcacagtaaccctgcgggtattcagcaagctctggctcagctgtcatccaggcagggctcggtaaccgccccagggggtcatcctcgccacaagccaggcccacctcaggccccacagggtcccagtcccaggccacctactcgctatgaaccccaacgggtgaactccggactgagcagcgatccacattttgaagagccgggacctatggtcaggggcgtgggcggaacacccagggattctgccggtgtcagcccgttccctccaaagaggagagagagacctccgagaaagccagagcttctgcaggaggagagccttccccctccacactccagcggtttcctcggttctaagccagaaggcccagggcctcaggctgaatctagggataccgggaccgaagcacttactccgcacatctggaatcggcttcataccgcaaccagtcggaagagttacagaccatctagcatggagccatggatggaacctctatctccctttgaagatgtcgcaggcactgaaatgagtcagagcgacagcggggtcgacctgtctggtgactcacaggtgtcgtccggcccttgctcacagaggagtagtcccgacggagggctcaagggcgcagctgagggccctccaaaaaggccaggcggtagctcccccctcaatgctgtgccttgtgaaggccctccaggctcagaaccgccacggcgtcctcctccagcccctcatgatggggaccgtaaagagctcccaagggaacaacccctgccacccggtcccatcggcactgagcggtcccaacgcacagaccgagggaccgagcctggccctatcagaccttcccacagacccggacccccagtgcaattcggtactagtgataaagacagcgacttgcggttagtggttggcgactctcttaaagcagagaaagagctgaccgccagcgtcacggaagctattcctgtgagtcgagactgggagttacttcccagtgcagctgcctctgccgagccacagtctaagaatctagattctggtcattgtgtgcccgagccgtcttcttctggccaacgcttgtaccctgaagtgttttatggcagcgccggtcccagttcgagtcagatcagcggaggggctatggattcccagctccatcccaactccggcggattccggccaggcaccccatctctgcacccctaccgatcccagccactctacctgcccccaggccctgcaccccctagcgctctgttgtctggtgtcgctttaaagggccagttcctcgacttctccaccatgcaggccacagagctcggaaaactcccagccggaggcgtgctctaccctccgccatcctttctctactctcctgctttttgcccttcacctctccccgacacaagtctactgcaggtgaggcaggacttgcctagtccatccgatttctacagtactcctctacaaccagggggtcagagcggattcctgcctagcggcgcacctgcccagcagatgctcctgcctatggtggactcgcagctcccggtagtcaactttggctccctgccccctgcgcctccccctgcccctcctcctctgagtctgctcccagttgggcctgcactgcaaccaccaagccttgccgtcagaccgcctccggcaccagctactcgcgttctgccttccccagctcgcccatttcccgcttcgttggggcgtgcagaacttcaccctgtggagttaaaacccttccaggattatcagaagctttccagtaacttgggagggcctgggagcagccggacccccccaaccggcagaagtttttcaggcctgaactcaagactgaaggccacgccaagtacttactccggtgtcttccgtacccagcgtgtcgatctctatcagcaagcttccccgcctgacgccctgaggtggattccgaaaccttgggaaaggacaggcccacctcccagggagggccctagccggagagccgaagaaccaggaagccgaggagacaaagaaccagggctgcccccacccagatag

SEQ ID NO: 345150 - DNA, 4149 bp, Artificial Sequence
  derived and/or modified sequence
atgctgagggaacgcggaacgcctcctgtcgatccaaaattggcatgggtgggagatgtgttcactgctaccccagcggagcccagaccattaacttctcccttacgccaagcagctgacgaggatgataaggggatgcgatctgagactccacccgtgccgccaccaccaccttacttagcttcctatccaggattccccgaaaacggcgcaccgggtcccccaatcagccggtttcctctcgaagagcctggcccacggccacttccatggccacccggtagtgacgaagttgcaaaaattcagacgcctccccctaagaaggaaccgccaaaggaggagactgcccaattgacaggaccagaggctgggcgaaaaccggcacgaggggtcggatctggtggccaggggcctccgcctccccgtagggagtctagaaccgagacccgatggggcccacggcctgggagctcaaggagagggattccaccagaagaaccgggagcccctcccagaagagccggacctataaaaaagccaccaccccctaccaaagtggaggagctcccgcctaaaccattagagcaaggtgatgagacacccaagccacccaaaccggatcctctaaaaatcactaagggtaagctggggggacccaaggagactccaccaaatggcaacctgtccccagcacccaggctgagaagggattactcctatgaaagagtgggaccaacttcctgtaggggtcgaggccgaggtgaatactttgcacgtggtaggggattcagaggtacctatggcggtcgagggagaggcgctaggtccagagaatttagatcttacagagaattccgtggagacgacggcagagggggaggaaccggcggtcctaaccaccccccagccccacgcggacgcacagcctccgagaccagatcagaaggttcagagtatgaggagattccaaagagaaggagacagagaggtagcgaaacgggatcagagacccacgagtccgaccttgccccatctgataaggaggcaccaaccccaaaggaaggaaccctgacccaggtgcccctagctccccctcctcccggagcaccacccagtcccgctccagcacggttcacagctagaggaggtcgagtgttcacacccaggggagtgcctagcaggcgcggtaggggaggcggaagacctccaccccaggtttgtcctggatggagcccacctgcgaagagtcttgcccctaaaaagcccccaactggcccactcccgccaagcaaggagccgctaaaggagaaactcatccccggacccctgtcccccgttgccagaggcggatctaatggaggcagcaacgtgggtatggaagacggcgagcggcctaggaggagacggcacggccgagcgcaacaacaggataagccaccaagatttcggaggttaaagcaggagagggagaacgccgcacggggatctgaaggaaaacctagccttaccctcccagctagcgcacccggacctgaagaggctttgaccactgtgaccgtcgcaccagcccctcgcagggctgctgccaagagcccagatctgagcaatcagaattcagaccaggccaacgaggaatgggagaccgcatccgagtcaagtgacttcaccagcgaacgcaggggcgacaaagaagctcctccacctgtcctgctaacccccaaggcggttggcacaccagggggaggcggtggcggagctgtccctgggatatcagccatgagcagaggggatttgagtcagagggctaaagatctatcaaagaggagtttttcgtcccaacggcctgggatggaacggcaaaataggcgccctggaccagggggtaaagcaggctctagcggatctagttccggcggagggggaggaggccctggtggcaggaccggcccagggaggggagacaagcgatcatggcctagcccgaaaaatcgatcgcgccctcccgaagaaagaccacccggactgcccctcccaccccctccaccctcgagcagcgctgttttcaggcttgaccaagtaattcattcgaatccagccggaatacagcaggcgctcgcacagttgtcgtcacggcagggatcagtgaccgcaccagggggtcatcctagacataagccgggtcctcctcaggctcctcagggcccttcaccaaggccacctacacggtatgaaccacagcgcgtcaacagcggcctctctagcgatcctcacttcgaggagccagggcctatggttcgtggggtaggcggaacccccagagatagcgccggtgtgagcccctttccaccaaaacgtagggagaggcctccgaggaagcctgagttgctccaggaggagtcgttgcccccaccacactcttctggcttcctggggtcgaaacctgaagggcctggccctcaggctgagagccgagacacgggcaccgaggctctgaccccccatatttggaataggctccatactgcaacctcgagaaagtcatataggccaagttccatggagccatggatggagccactgagtcccttcgaagatgttgccggaactgagatgtcccaaagcgatagcggcgtagacttgagtggcgactcccaggtgtcatccgggccatgctcacaacggtcatcacctgatggcggacttaaaggtgcagcagaaggccctcccaaaagaccaggtggttctagtccattgaatgctgtcccctgtgagggccctccgggtagtgaacccccaaggaggcccccacctgcccctcacgacggcgatcgcaaggaacttccccgtgagcaacccttgccacctggcccaatcggcacggaacgcagccagcgcaccgatagggggaccgagccaggtcctatccgtccatcacaccgacccggacccccagtacaatttggtaccagtgataaggactcagacttgcgactggtcgtgggtgatagtctcaaggcagagaaggagctcaccgcatctgttaccgaggcgatacccgtgagtcgagactgggaactgctgccaagtgccgcagcctctgccgaaccacaatccaaaaatctggactccggccattgcgtgccagaaccttcatcatccgggcagagactttaccccgaagtgttctacgggtccgcaggccctagcagctcacagataagcggcggtgccatggattcccagctccatcccaacagtgggggttttcgccctggaacaccaagtctccacccttaccgctcccagccgctatatcttccaccgggaccagctccaccttcagcactgctctctggtgtcgcactgaagggacagttcctggactttagtaccatgcaggcgacagagcttggcaagttgccagcaggcggtgtgctgtatcctcccccaagttttctgtactcacctgccttttgtccatctcccttgccagacacatcactcttgcaggtgcggcaggatctgccatccccatccgatttttacagtacccctcttcagcccggaggccagtcaggattcctgccttctggagcccctgcacagcaaatgcttctccctatggtggatagtcagcttccggtggttaatttcgggtctttaccccctgcgccaccccctgcccctcctcccctgtcgcttctgcccgtggggccagcattgcaaccaccttctctggccgtgcgaccaccccctgctccagctacaagggtgcttccttcccccgcaagaccttttcctgctagcctcggccgagcagagctccatcctgtggaactcaagccctttcaggattatcagaaactttcaagcaacctgggagggccaggaagcagcagaaccccccctacgggcaggtcctttagcggtctgaatagtcgcctgaaagcgactccatctacctacagcggtgtcttccgcacacagagggtggatttgtatcagcaggcaagccctcccgacgccctgaggtggattcctaagccttgggaacggactggcccaccacctcgggagggacctagccgacgggctgaagagcctggtagtaggggagataaagaaccagggctccccccaccaagatag

SEQ ID NO: 345151 - DNA, 6893 bp, Artificial Sequence
  derived and/or modified sequence
cagccgcggagtgagcgagggagacgggaggagccgaacccggcgccatccgccgccatcctcccccgccccaccgccatcccgtcccggggagcccctaggcccgggtcccggatccccgcgcacccggccaggggacagagactgagacacttgctgtctggcccacaggctctggcacgttttgggggaggtgcctgcaggacccaacatactcaatgagcttccagcgcaatgtccgatcgctcggggccgactgccaagggaaaggatggaaagaagtattcctcgctcaacctgtttgatacgtataagggcaagtccttagagatccagaaacccgctgttgcccctcgccatggcctgcagagtctcgggaaagttgccattgcccggcgtatgccacctccagccaaccttccaagcctgaaagccgagaacaaaggcaatgaccccaatgtctcactagtgccaaaagacggaacaggatgggcaagcaaacaggagcagtccgaccccaagagttccgatgcctcaaccgctcagccgctggaatcgcagccactgccggcttcacagacgcctgcctccaaccagccgaaacgacccccagcagcccccgagaacactcctttggttccaagcggggtaaagtcctgggcacaagccagcgtcacccatggagcacatggagatggtggaagggcatcaagcctactgtcacgattctctcgagaggaatttccgaccctgcaggcggctggcgaccaggacaaggctgccaaggaaagggagtctgccgaacagtcgtctgggcccggaccaagcctccgcccccaaaattctacaacttggagggacggaggtgggcgtggccctgatgagctggagggcccggactccaaacttcatcatggtcatgatccccggggtgggctacagccttcaggcccaccccagttccctccctaccgcggaatgatgccgcctttcatgtatcccccatatctcccgttccctccgccctatggaccccaggggccttaccgataccccactcctgatgggcccagccgttttccccgtgtggcgggcccccgaggctcagggccaccaatgcgcttagtagagcctgtgggtcgtccctctattctcaaagaggataatctcaaagagtttgatcagttggatcaggagaatgatgatggttgggcaggggcccatgaagaggttgactacactgaaaagctcaagttcagcgatgaggaagatgggcgagactctgatgaggagggagctgagggccacagggattcccaatcagcttctggtgaggaacggccccctgaagcagatggcaaaaagggcaactcccccaacagcgaaccgcccactcctaagacggcctgggcagaaacctctcggcctccagagacagagccgggacctcctgccccaaagcctcccctacccccacctcaccggggccccgccgggaactggggcccccctggggactacccagatcgtgggggtcctccctgcaagcccccagcacctgaagatgaggatgaggcatggcggcagcgacgaaagcagtcgtcatctgagatttccctggcagtggagcgggcccggcgacggcgagaagaagaggagcggcgcatgcaagaagagcgccgggcagcctgtgctgagaagctcaagcgactcgatgaaaagtttggggcacctgacaagcggctcaaagcagagcctgctgccccacctgctgccccttctaccccagctccaccacctgcagtccctaaagaactccctgcacctccagctccacctccagcatcagccccaacaccagagaaagaacctgaagagccagcacaggcccctcctgcccaatctactcctactccaggtgtggctgcggctcccactctggtgagtggtggtggcagtaccagtagcaccagcagtggcagcttcgaagccagcccagtggaaccacaactgccctcaaaagagggtcctgaaccaccagaagaggttcctcctcctaccacacccccagttccaaaggtggaacccaagggtgatgggattggtcccacccgccagccccctagtcagggcttgggctaccccaaatatcagaagtcgttgcctcctcgtttccagcggcagcagcaggagcagctcctgaagcagcagcagcagcaccagtggcagcagcatcaacagggctctgcccctcctaccccagtgcccccatcaccaccacagcctgtgaccctgggggctgtgccagctccacaggctccacccccgccccccaaggccctgtacccaggtgctctgggccggcccccacccatgcccccaatgaactttgatccccgatggatgatgattcctccttatgtggacccccggctcctccagggtcgtccccctctagacttctaccctcctggtgtgcatccctctggcctagttccccgagagcgttcagacagtgggggctcaagctcagagccatttgaccgtcatgcacctgctatgttacgggaacggggcactccaccggtggatccaaagttggcctgggtaggagatgtcttcaccgccacacccgctgaaccccgcccacttacctcacctctgcgccaggctgcggatgaggatgacaaggggatgaggagcgagactcctccagtacctcccccaccaccctatctggccagttatccaggctttcctgagaatggagcccctgggcccccaatctctcgctttcctctggaggaaccagggccccgtccactcccctggcccccaggcagtgatgaagtggccaagatacaaactccaccacccaagaaggagccccctaaggaggagactgcacagctgacggggccagaagcaggccgaaagcctgcccgcggagtcgggagtggaggccagggccccccaccaccacgcagagagagtcgcacagagacccgctggggccctcgtccagggagcagtcgtcgtggaatccctccagaggagccaggggccccaccccgccgggctgggcctataaagaaacctccaccacctacaaaagtagaagagctgcctcccaagcccctcgaacagggggatgaaacccccaaacccccaaagccagacccactcaagataaccaaggggaagctagggggccccaaggagaccccacccaatggaaatctttcccctgccccaaggcttcggagggactattcgtatgaaagagtgggtcctacctcttgccggggtcggggccgaggcgagtattttgccagagggaggggttttcgggggacctatgggggacgagggcggggagcccgaagccgggaattccgcagttaccgagagtttcgaggagatgatgggcgtggaggtgggacagggggaccaaaccaccctcctgctccccgaggccgcactgccagcgagacacggagcgagggttcagagtatgaggaaatccccaagcggcgccggcagcggggctcagaaacaggcagcgagacccatgagagtgatctggctccttcagacaaggaggctcccacacccaaggagggaacactcacccaggtccctctcgctcccccaccaccaggagccccaccttcaccagccccagcccgcttcactgcccggggtgggcgagtcttcactcccagaggggtgccatctcgccggggccgaggaggagggaggccccctcctcaagtttgcccaggctggagccctccagccaagtctctggctcccaagaaacctcccacaggccctttgccaccaagtaaggagcctttgaaagagaagttgatcccagggcctctgtcccctgtggcgcgcggaggcagcaatggaggtagcaatgtgggcatggaagatggggagcgaccccgaaggaggcgacatgggagggctcagcagcaggataaaccgcctcgtttccggaggctgaagcaggaacgggagaatgccgcaagggggtctgagggcaagccctccctaacccttccagcctccgctcctggacctgaggaggccctcacaacagtcacagtggccccagcacctcgccgggcagctgccaagtctcctgatctgtcaaaccagaactcagaccaagccaatgaggaatgggagactgcatcagagagcagtgacttcaccagtgagcgccgaggggacaaagaggcacccccaccagtactgctgacacccaaggctgtgggaactcctgggggaggtggaggtggagccgtaccaggtatttcagccatgtcccgcggagatctgagccagagagccaaggatttgagtaaacggagcttctcaagtcagcggccaggcatggaacggcagaatcggcgccctggcccagggggcaaggctggcagcagtggcagcagcagtggaggaggcggtgggggtcctggaggaaggaccgggccaggacgaggcgacaagaggagctggccctctcccaagaaccgaagtcgtcctccagaggagcgtcccccggggcttcccctgcctcccccacctcccagcagttctgctgtcttccgcctggaccaagttatccacagcaaccctgctggcatccaacaggctctggcccagcttagtagccgtcaagggagtgtaactgcaccagggggtcatccaaggcacaagcctgggcctccccaagcccctcagggcccctctcctaggcccccaacccgatacgagccccagagggtcaacagcggcctcagttctgacccccactttgaggagccggggccaatggtgagaggggtgggtgggactcctcgggactctgccggggttagtccctttccccctaaacgtcgggagcggcctcccagaaaaccagagctgctacaggaggaatctttgccacctcctcatagctctggattcttgggctctaagcctgagggcccaggccctcaggcagagtccagagatacaggcacagaggccctgacccctcacatctggaaccgtttacatactgccactagccgaaagagttaccggcccagctccatggagccttggatggagcccctgagtccttttgaggatgtggctggcacagaaatgagtcagtctgacagtggggtggacctgagtggggattctcaggtgtcatcaggtccctgcagccagcgaagttcccctgatggaggactcaagggggcagcagagggaccccccaagaggcctggaggctcctcacccctgaatgctgttccttgtgagggtccacctggctctgaacctcctaggagaccaccacctgccccccacgatggggacagaaaggagctgccccgggagcagcctctgccccctggccccattggcacagaacgatcacagcgtacagaccgaggcacagagcctggccccattcggccatcccatcgacctggtcccccagtccagtttggcactagtgacaaggactcagacttacgcctagtggtaggagacagcttgaaagcagagaaggagctaacagcatcagtcactgaggccattcctgtatcacgagactgggagctgcttcccagtgctgctgcctctgctgagccacaatccaagaacctggattctgggcactgtgtcccggagcccagctcctcaggccagcgcctgtatcctgaggttttctatggcagtgctgggccttccagttctcagatctctgggggagccatggactctcaattacatccaaacagtggaggcttccgccctgggacaccctcactgcacccttacagatcacagcccctatacctaccccccggcccagcccctccctcagcactgctctctggggtagctctcaagggccagtttctggatttctccacaatgcaagctacagagctggggaagttgccggctggaggagttctctaccctccaccttccttcctctactctccggctttctgccccagtcctttgcctgacacatcgttgcttcaggtacgccaggatctgccatccccttcggatttttattctactcctctgcagcctggtggccaaagtggctttctcccttcaggggctcctgcccagcagatgcttctacccatggtagactcacagctgcctgtggtgaactttggctccctgccgccagcaccacctcctgccccacctcccctttctctgttacctgtgggccctgctctgcagccccccagcctggctgtgcggcccccacctgctcctgctactcgggtgctgccttcacctgccaggcccttccccgctagcttggggcgagcagagctgcatccagtggaactaaagccgttccaggattatcaaaaactgagcagcaaccttgggggacctggatcatcacggactcccccaactggaaggtccttctctggcctcaattcccgtctcaaggccacgccttccacctacagtggagtcttccgcacccagcgcgtcgacctttaccagcaggcctccccaccagatgccctgcgctggatacctaagccttgggagcggacagggccgccacctcgagaagggccctcccgacgggcagaggagcctgggtcccgaggggacaaggagcctgggttgcccccaccccgctgagggagttcctcttgccccctacccccggggcttgtatatagattataaatatataagggggaaaggggtgggcggggaggggttgtggggctggggcctcacttcccctcctcccccttcccctggtcccctgtccctggggctgtttgttaaaaaagagtaataaaaggatttaaaaaaaaaaa

SEQ ID NO: 345152 - DNA, 6893 bp, Artificial Sequence
  derived and/or modified sequence
cagccgcggagtgagcgagggagacgggaggagccgaacccggcgccatccgccgccatcctcccccgccccaccgccatcccgtcccggggagcccctaggcccgggtcccggatccccgcgcacccggccaggggacagagactgagacacttgctgtctggcccacaggctctggcacgttttgggggaggtgcctgcaggacccaacatactcaatgagcttccagcgcaatgtccgatcgctcggggccgactgccaagggaaaggatggaaagaagtattcctcgctcaacctgtttgatacgtataagggcaagtccttagagatccagaaacccgctgttgcccctcgccatggcctgcagagtctcgggaaagttgccattgcccggcgtatgccacctccagccaaccttccaagcctgaaagccgagaacaaaggcaatgaccccaatgtctcactagtgccaaaagacggaacaggatgggcaagcaaacaggagcagtccgaccccaagagttccgatgcctcaaccgctcagccgccggaatcgcagccactgccggcttcacagacgcctgcctccaaccagccgaaacgacccccagcagcccccgagaacactcctttggttccaagcggggtaaagtcctgggcacaagccagcgtcacccatggagcacatggagatggtggaagggcatcaagcctactgtcacgattctctcgagaggaatttccgaccctgcaggcggctggcgaccaggacaaggctgccaaggaaagggagtctgccgaacagtcgtctgggcccggaccaagcctccgcccccaaaattctacaacttggagggacggaggtgggcgtggccctgatgagctggagggcccggactccaaacttcatcatggtcatgatccccggggtgggctacagccttcaggcccaccccagttccctccctaccgcggaatgatgccgcctttcatgtatcccccatatctcccgttccctccgccctatggaccccaggggccttaccgataccccactcctgatgggcccagccgttttccccgtgtggcgggcccccgaggctcagggccaccaatgcgcttagtagagcctgtgggtcgtccctctattctcaaagaggataatctcaaagagtttgatcagttggatcaggagaatgatgatggttgggcaggggcccatgaagaggttgactacactgaaaagctcaagttcagcgatgaggaagatgggcgagactctgatgaggagggagctgagggccacagggattcccaatcagcttctggtgaggaacggccccctgaagcagatggcaaaaagggcaactcccccaacagcgaaccgcccactcctaagacggcctgggcagaaacctctcggcctccagagacagagccgggacctcctgccccaaagcctcccctacccccacctcaccggggccccgccgggaactggggcccccctggggactacccagatcgtgggggtcctccctgcaagcccccagcacctgaagatgaggatgaggcatggcggcagcgacgaaagcagtcgtcatctgagatttccctggcagtggagcgggcccggcgacggcgagaagaagaggagcggcgcatgcaagaagagcgccgggcagcctgtgctgagaagctcaagcgactcgatgaaaagtttggggcacctgacaagcggctcaaagcagagcctgctgccccacctgctgccccttctaccccagctccaccacctgcagtccctaaagaactccctgcacctccagctccacctccagcatcagccccaacaccagagaaagaacctgaagagccagcacaggcccctcctgcccaatctactcctactccaggtgtggctgcggctcccactctggtgagtggtggtggcagtaccagtagcaccagcagtggcagcttcgaagccagcccagtggaaccacaactgccctcaaaagagggtcctgaaccaccagaagaggttcctcctcctaccacacccccagttccaaaggtggaacccaagggtgatgggattggtcccacccgccagccccctagtcagggcttgggctaccccaaatatcagaagtcgttgcctcctcgtttccagcggcagcagcaggagcagctcctgaagcagcagcagcagcaccagtggcagcagcatcaacagggctctgcccctcctaccccagtgcccccatcaccaccacagcctgtgaccctgggggctgtgccagctccacaggctccacccccgccccccaaggccctgtacccaggtgctctgggccggcccccacccatgcccccaatgaactttgatccccgatggatgatgattcctccttatgtggacccccggctcctccagggtcgtccccctctagacttctaccctcctggtgtgcatccctctggcctagttccccgagagcgttcagacagtgggggctcaagctcagagccatttgaccgtcatgcacctgctatgttacgggaacggggcactccaccggtggatccaaagttggcctgggtaggagatgtcttcaccgccacacccgctgaaccccgcccacttacctcacctctgcgccaggctgcggatgaggatgacaaggggatgaggagcgagactcctccagtacctcccccaccaccctatctggccagttatccaggctttcctgagaatggagcccctgggcccccaatctctcgctttcctctggaggaaccagggccccgtccactcccctggcccccaggcagtgatgaagtggccaagatacaaactccaccacccaagaaggagccccctaaggaggagactgcacagctgacggggccagaagcaggccgaaagcctgcccgcggagtcgggagtggaggccagggccccccaccaccacgcagagagagtcgcacagagacccgctggggccctcgtccagggagcagtcgtcgtggaatccctccagaggagccaggggccccaccccgccgggctgggcctataaagaaacctccaccacctacaaaagtagaagagctgcctcccaagcccctcgaacagggggatgaaacccccaaacccccaaagccagacccactcaagataaccaaggggaagctagggggccccaaggagaccccacccaatggaaatctttcccctgccccaaggcttcggagggactattcgtatgaaagagtgggtcctacctcttgccggggtcggggccgaggcgagtattttgccagagggaggggttttcgggggacctatgggggacgagggcggggagcccgaagccgggaattccgcagttaccgagagtttcgaggagatgatgggcgtggaggtgggacagggggaccaaaccaccctcctgctccccgaggccgcactgccagcgagacacggagcgagggttcagagtatgaggaaatccccaagcggcgccggcagcggggctcagaaacaggcagcgagacccatgagagtgatctggctccttcagacaaggaggctcccacacccaaggagggaacactcacccaggtccctctcgctcccccaccaccaggagccccaccttcaccagccccagcccgcttcactgcccggggtgggcgagtcttcactcccagaggggtgccatctcgccggggccgaggaggagggaggccccctcctcaagtttgcccaggctggagccctccagccaagtctctggctcccaagaaacctcccacaggccctttgccaccaagtaaggagcctttgaaagagaagttgatcccagggcctctgtcccctgtggcgcgcggaggcagcaatggaggtagcaatgtgggcatggaagatggggagcgaccccgaaggaggcgacatgggagggctcagcagcaggataaaccgcctcgtttccggaggctgaagcaggaacgggagaatgccgcaagggggtctgagggcaagccctccctaacccttccagcctccgctcctggacctgaggaggccctcacaacagtcacagtggccccagcacctcgccgggcagctgccaagtctcctgatctgtcaaaccagaactcagaccaagccaatgaggaatgggagactgcatcagagagcagtgacttcaccagtgagcgccgaggggacaaagaggcacccccaccagtactgctgacacccaaggctgtgggaactcctgggggaggtggaggtggagccgtaccaggtatttcagccatgtcccgcggagatctgagccagagagccaaggatttgagtaaacggagcttctcaagtcagcggccaggcatggaacggcagaatcggcgccctggcccagggggcaaggctggcagcagtggcagcagcagtggaggaggcggtgggggtcctggaggaaggaccgggccaggacgaggcgacaagaggagctggccctctcccaagaaccgaagtcgtcctccagaggagcgtcccccggggcttcccctgcctcccccacctcccagcagttctgctgtcttccgcctggaccaagttatccacagcaaccctgctggcatccaacaggctctggcccagcttagtagccgtcaagggagtgtaactgcaccagggggtcatccaaggcacaagcctgggcctccccaagcccctcagggcccctctcctaggcccccaacccgatacgagccccagagggtcaacagcggcctcagttctgacccccactttgaggagccggggccaatggtgagaggggtgggtgggactcctcgggactctgccggggttagtccctttccccctaaacgtcgggagcggcctcccagaaaaccagagctgctacaggaggaatctttgccacctcctcatagctctggattcttgggctctaagcctgagggcccaggccctcaggcagagtccagagatacaggcacagaggccctgacccctcacatctggaaccgtttacatactgccactagccgaaagagttaccggcccagctccatggagccttggatggagcccctgagtccttttgaggatgtggctggcacagaaatgagtcagtctgacagtggggtggacctgagtggggattctcaggtgtcatcaggtccctgcagccagcgaagttcccctgatggaggactcaagggggcagcagagggaccccccaagaggcctggaggctcctcacccctgaatgctgttccttgtgagggtccacctggctctgaacctcctaggagaccaccacctgccccccacgatggggacagaaaggagctgccccgggagcagcctctgccccctggccccattggcacagaacgatcacagcgtacagaccgaggcacagagcctggccccattcggccatcccatcgacctggtcccccagtccagtttggcactagtgacaaggactcagacttacgcctagtggtaggagacagcttgaaagcagagaaggagctaacagcatcagtcactgaggccattcctgtatcacgagactgggagctgcttcccagtgctgctgcctctgctgagccacaatccaagaacctggattctgggcactgtgtcccggagcccagctcctcaggccagcgcctgtatcctgaggttttctatggcagtgctgggccttccagttctcagatctctgggggagccatggactctcaattacatccaaacagtggaggcttccgccctgggacaccctcactgcacccttacagatcacagcccctatacctacccccgggcccagcccctccctcagcactgctctctggggtagctctcaagggccagtttctggatttctccacaatgcaagctacagagctggggaagttgccggctggaggagttctctaccctccaccttccttcctctactctccggctttctgccccagtcctttgcctgacacatcgttgcttcaggtacgccaggatctgccatccccttcggatttttattctactcctctgcagcctggtggccaaagtggatttctcccttcaggggctcctgcccagcagatgcttctacccatggtagactcacagctgcctgtggtgaactttggctccctgccgccagcaccacctcctgccccacctcccctttctctgttacctgtgggccctgctctgcagccccccagcctggctgtgcggcccccacctgctcctgctactcgggtgctgccttcacctgccaggcccttccccgctagcttggggcgagcagagctgcatccagtggaactaaagccgttccaggattatcaaaaactgagcagcaaccttgggggacctggatcatcacggactcccccaactggaaggtccttctctggcctcaattcccgtctcaaggccacgccttccacctacagtggagtcttccgcacccagcgcgtcgacctttaccagcaggcctccccaccagatgccctgcgctggatacctaagccttgggagcggacagggccgccacctcgagaagggccctcccgacgggcagaggagcctgggtcccgaggggacaaggagcctgggttgcccccaccccgctgagggagttcctcttgccccctacccccggggcttgtatatagattataaatatataagggggaaaggggtgggcggggaggggttgtggggctggggcctcacttcccctcctcccccttcccctggtcccctgtccctggggctgtttgttaaaaaagagtaataaaaggatttaaaaaaaaaaa

SEQ ID NO: 345153 - DNA, 6861 bp, Artificial Sequence
  derived and/or modified sequence
gggctcagccgcggagtgagcgagggagacgggaggagccgaacccggcgccatccgccgccatcctcccccgccccaccgccatcccgtcccggggagcccctaggcccgggtcccggatccccgcgcacccggccaggctctggcacgttttgggggaggtgcctgcaggacccaacatactcaatgagcttccagcgcaatgtccgatcgctcggggccgactgccaagggaaaggatggaaagaagtattcctcgctcaacctgtttgatacgtataagggcaagtccttagagatccagaaacccgctgttgcccctcgccatggcctgcagagtctcgggaaagttgccattgcccggcgtatgccacctccagccaaccttccaagcctgaaagccgagaacaaaggcaatgaccccaatgtctcactagtgccaaaagacggaacaggatgggcaagcaaacaggagcagtccgaccccaagagttccgatgcctcaaccgctcagccgctggaatcgcagccactgccggcttcacagacgcctgcctccaaccagccgaaacgacccccagcagcccccgagaacactcctttggttccaagcggggtaaagtcctgggcacaagccagcgtcacccatggagcacatggagatggtggaagggcatcaagcctactgtcacgattctctcgagaggaatttccgaccctgcaggcggctggcgaccaggacaaggctgccaaggaaagggagtctgccgaacagtcgtctgggcccggaccaagcctccgcccccaaaattctacaacttggagggacggaggtgggcgtggccctgatgagctggagggcccggactccaaacttcatcatggtcatgatccccggggtgggctacagccttcaggcccaccccagttccctccctaccgcggaatgatgccgcctttcatgtatcccccatatctcccgttccctccgccctatggaccccaggggccttaccgataccccactcctgatgggcccagccgttttccccgtgtggcgggcccccgaggctcagggccaccaatgcgcttagtagagcctgtgggtcgtccctctattctcaaagaggataatctcaaagagtttgatcagttggatcaggagaatgatgatggttgggcaggggcccatgaagaggttgactacactgaaaagctcaagttcagcgatgaggaagatgggcgagactctgatgaggagggagctgagggccacagggattcccaatcagcttctggtgaggaacggccccctgaagcagatggcaaaaagggcaactcccccaacagcgaaccgcccactcctaagacggcctgggcagaaacctctcggcctccagagacagagccgggacctcctgccccaaagcctcccctacccccacctcaccggggccccgccgggaactggggcccccctggggactacccagatcgtgggggtcctccctgcaagcccccagcacctgaagatgaggatgaggcatggcggcagcgacgaaagcagtcgtcatctgagatttccctggcagtggagcgggcccggcgacggcgagaagaagaggagcggcgcatgcaagaagagcgccgggcagcctgtgctgagaagctcaagcgactcgatgaaaagtttggggcacctgacaagcggctcaaagcagagcctgctgccccacctgctgccccttctaccccagctccaccacctgcagtccctaaagaactccctgcacctccagctccacctccagcatcagccccaacaccagagaaagaacctgaagagccagcacaggcccctcctgcccaatctactcctactccaggtgtggctgcggctcccactctggtgagtggtggtggcagtaccagtagcaccagcagtggcagcttcgaagccagcccagtggaaccacaactgccctcaaaagagggtcctgaaccaccagaagaggttcctcctcctaccacacccccagttccaaaggtggaacccaagggtgatgggattggtcccacccgccagccccctagtcagggcttgggctaccccaaatatcagaagtcgttgcctcctcgtttccagcggcagcagcaggagcagctcctgaagcagcagcagcagcaccagtggcagcagcatcaacagggctctgcccctcctaccccagtgcccccatcaccaccacagcctgtgaccctgggggctgtgccagctccacaggctccacccccgccccccaaggccctgtacccaggtgctctgggccggcccccacccatgcccccaatgaactttgatccccgatggatgatgattcctccttatgtggacccccggctcctccagggtcgtccccctctagacttctaccctcctggtgtgcatccctctggcctagttccccgagagcgttcagacagtgggggctcaagctcagagccatttgaccgtcatgcacctgctatgttacgggaacggggcactccaccggtggatccaaagttggcctgggtaggagatgtcttcaccgccacacccgctgaaccccgcccacttacctcacctctgcgccaggctgcggatgaggatgacaaggggatgaggagcgagactcctccagtacctcccccaccaccctatctggccagttatccaggctttcctgagaatggagcccctgggcccccaatctctcgctttcctctggaggaaccagggccccgtccactcccctggcccccaggcagtgatgaagtggccaagatacaaactccaccacccaagaaggagccccctaaggaggagactgcacagctgacggggccagaagcaggccgaaagcctgcccgcggagtcgggagtggaggccagggccccccaccaccacgcagagagagtcgcacagagacccgctggggccctcgtccagggagcagtcgtcgtggaatccctccagaggagccaggggccccaccccgccgggctgggcctataaagaaacctccaccacctacaaaagtagaagagctgcctcccaagcccctcgaacagggggatgaaacccccaaacccccaaagccagacccactcaagataaccaaggggaagctagggggccccaaggagaccccacccaatggaaatctttcccctgccccaaggcttcggagggactattcgtatgaaagagtgggtcctacctcttgccggggtcggggccgaggcgagtattttgccagagggaggggttttcgggggacctatgggggacgagggcggggagcccgaagccgggaattccgcagttaccgagagtttcgaggagatgatgggcgtggaggtgggacagggggaccaaaccaccctcctgctccccgaggccgcactgccagcgagacacggagcgagggttcagagtatgaggaaatccccaagcggcgccggcagcggggctcagaaacaggcagcgagacccatgagagtgatctggctccttcagacaaggaggctcccacacccaaggagggaacactcacccaggtccctctcgctcccccaccaccaggagccccaccttcaccagccccagcccgcttcactgcccggggtgggcgagtcttcactcccagaggggtgccatctcgccggggccgaggaggagggaggccccctcctcaagtttgcccaggctggagccctccagccaagtctctggctcccaagaaacctcccacaggccctttgccaccaagtaaggagcctttgaaagagaagttgatcccagggcctctgtcccctgtggcgcgcggaggcagcaatggaggtagcaatgtgggcatggaagatggggagcgaccccgaaggaggcgacatgggagggctcagcagcaggataaaccgcctcgtttccggaggctgaagcaggaacgggagaatgccgcaagggggtctgagggcaagccctccctaacccttccagcctccgctcctggacctgaggaggccctcacaacagtcacagtggccccagcacctcgccgggcagctgccaagtctcctgatctgtcaaaccagaactcagaccaagccaatgaggaatgggagactgcatcagagagcagtgacttcaccagtgagcgccgaggggacaaagaggcacccccaccagtactgctgacacccaaggctgtgggaactcctgggggaggtggaggtggagccgtaccaggtatttcagccatgtcccgcggagatctgagccagagagccaaggatttgagtaaacggagcttctcaagtcagcggccaggcatggaacggcagaatcggcgccctggcccagggggcaaggctggcagcagtggcagcagcagtggaggaggcggtgggggtcctggaggaaggaccgggccaggacgaggcgacaagaggagctggccctctcccaagaaccgaagtcgtcctccagaggagcgtcccccggggcttcccctgcctcccccacctcccagcagttctgctgtcttccgcctggaccaagttatccacagcaaccctgctggcatccaacaggctctggcccagcttagtagccgtcaagggagtgtaactgcaccagggggtcatccaaggcacaagcctgggcctccccaagcccctcagggcccctctcctaggcccccaacccgatacgagccccagagggtcaacagcggcctcagttctgacccccactttgaggagccggggccaatggtgagaggggtgggtgggactcctcgggactctgccggggttagtccctttccccctaaacgtcgggagcggcctcccagaaaaccagagctgctacaggaggaatctttgccacctcctcatagctctggattcttgggctctaagcctgagggcccaggccctcaggcagagtccagagatacaggcacagaggccctgacccctcacatctggaaccgtttacatactgccactagccgaaagagttaccggcccagctccatggagccttggatggagcccctgagtccttttgaggatgtggctggcacagaaatgagtcagtctgacagtggggtggacctgagtggggattctcaggtgtcatcaggtccctgcagccagcgaagttcccctgatggaggactcaagggggcagcagagggaccccccaagaggcctggaggctcctcacccctgaatgctgttccttgtgagggtccacctggctctgaacctcctaggagaccaccacctgccccccacgatggggacagaaaggagctgccccgggagcagcctctgccccctggccccattggcacagaacgatcacagcgtacagaccgaggcacagagcctggccccattcggccatcccatcgacctggtcccccagtccagtttggcactagtgacaaggactcagacttacgcctagtggtaggagacagcttgaaagcagagaaggagctaacagcatcagtcactgaggccattcctgtatcacgagactgggagctgcttcccagtgctgctgcctctgctgagccacaatccaagaacctggattctgggcactgtgtcccggagcccagctcctcaggccagcgcctgtatcctgaggttttctatggcagtgctgggccttccagttctcagatctctgggggagccatggactctcaattacatccaaacagtggaggcttccgccctgggacaccctcactgcacccttacagatcacagcccctatacctaccccccggcccagcccctccctcagcactgctctctggggtagctctcaagggccagtttctggatttctccacaatgcaagctacagagctggggaagttgccggctggaggagttctctaccctccaccttccttcctctactctccggctttctgccccagtcctttgcctgacacatcgttgcttcaggtacgccaggatctgccatccccttcggatttttattctactcctctgcagcctggtggccaaagtggctttctcccttcaggggctcctgcccagcagatgcttctacccatggtagactcacagctgcctgtggtgaactttggctccctgccgccagcaccacctcctgccccacctcccctttctctgttacctgtgggccctgctctgcagccccccagcctggctgtgcggcccccacctgctcctgctactcgggtgctgccttcacctgccaggcccttccccgctagcttggggcgagcagagctgcatccagtggaactaaagccgttccaggattatcaaaaactgagcagcaaccttgggggacctggatcatcacggactcccccaactggaaggtccttctctggcctcaattcccgtctcaaggccacgccttccacctacagtggagtcttccgcacccagcgcgtcgacctttaccagcaggcctccccaccagatgccctgcgctggatacctaagccttgggagcggacagggccgccacctcgagaagggccctcccgacgggcagaggagcctgggtcccgaggggacaaggagcctgggttgcccccaccccgctgagggagttcctcttgccccctacccccggggcttgtatatagattataaatatataagggggaaaggggtgggcggggaggggttgtggggctggggcctcacttcccctcctcccccttcccctggtcccctgtccctggggctgtttgttaaaaaagagtaataaaaggatttaaaaaaaaaaa

SEQ ID NO: 345154 - DNA, 6861 bp, Artificial Sequence
  derived and/or modified sequence
gggctcagccgcggagtgagcgagggagacgggaggagccgaacccggcgccatccgccgccatcctcccccgccccaccgccatcccgtcccggggagcccctaggcccgggtcccggatccccgcgcacccggccaggctctggcacgttttgggggaggtgcctgcaggacccaacatactcaatgagcttccagcgcaatgtccgatcgctcggggccgactgccaagggaaaggatggaaagaagtattcctcgctcaacctgtttgatacgtataagggcaagtccttagagatccagaaacccgctgttgcccctcgccatggcctgcagagtctcgggaaagttgccattgcccggcgtatgccacctccagccaaccttccaagcctgaaagccgagaacaaaggcaatgaccccaatgtctcactagtgccaaaagacggaacaggatgggcaagcaaacaggagcagtccgaccccaagagttccgatgcctcaaccgctcagccgccggaatcgcagccactgccggcttcacagacgcctgcctccaaccagccgaaacgacccccagcagcccccgagaacactcctttggttccaagcggggtaaagtcctgggcacaagccagcgtcacccatggagcacatggagatggtggaagggcatcaagcctactgtcacgattctctcgagaggaatttccgaccctgcaggcggctggcgaccaggacaaggctgccaaggaaagggagtctgccgaacagtcgtctgggcccggaccaagcctccgcccccaaaattctacaacttggagggacggaggtgggcgtggccctgatgagctggagggcccggactccaaacttcatcatggtcatgatccccggggtgggctacagccttcaggcccaccccagttccctccctaccgcggaatgatgccgcctttcatgtatcccccatatctcccgttccctccgccctatggaccccaggggccttaccgataccccactcctgatgggcccagccgttttccccgtgtggcgggcccccgaggctcagggccaccaatgcgcttagtagagcctgtgggtcgtccctctattctcaaagaggataatctcaaagagtttgatcagttggatcaggagaatgatgatggttgggcaggggcccatgaagaggttgactacactgaaaagctcaagttcagcgatgaggaagatgggcgagactctgatgaggagggagctgagggccacagggattcccaatcagcttctggtgaggaacggccccctgaagcagatggcaaaaagggcaactcccccaacagcgaaccgcccactcctaagacggcctgggcagaaacctctcggcctccagagacagagccgggacctcctgccccaaagcctcccctacccccacctcaccggggccccgccgggaactggggcccccctggggactacccagatcgtgggggtcctccctgcaagcccccagcacctgaagatgaggatgaggcatggcggcagcgacgaaagcagtcgtcatctgagatttccctggcagtggagcgggcccggcgacggcgagaagaagaggagcggcgcatgcaagaagagcgccgggcagcctgtgctgagaagctcaagcgactcgatgaaaagtttggggcacctgacaagcggctcaaagcagagcctgctgccccacctgctgccccttctaccccagctccaccacctgcagtccctaaagaactccctgcacctccagctccacctccagcatcagccccaacaccagagaaagaacctgaagagccagcacaggcccctcctgcccaatctactcctactccaggtgtggctgcggctcccactctggtgagtggtggtggcagtaccagtagcaccagcagtggcagcttcgaagccagcccagtggaaccacaactgccctcaaaagagggtcctgaaccaccagaagaggttcctcctcctaccacacccccagttccaaaggtggaacccaagggtgatgggattggtcccacccgccagccccctagtcagggcttgggctaccccaaatatcagaagtcgttgcctcctcgtttccagcggcagcagcaggagcagctcctgaagcagcagcagcagcaccagtggcagcagcatcaacagggctctgcccctcctaccccagtgcccccatcaccaccacagcctgtgaccctgggggctgtgccagctccacaggctccacccccgccccccaaggccctgtacccaggtgctctgggccggcccccacccatgcccccaatgaactttgatccccgatggatgatgattcctccttatgtggacccccggctcctccagggtcgtccccctctagacttctaccctcctggtgtgcatccctctggcctagttccccgagagcgttcagacagtgggggctcaagctcagagccatttgaccgtcatgcacctgctatgttacgggaacggggcactccaccggtggatccaaagttggcctgggtaggagatgtcttcaccgccacacccgctgaaccccgcccacttacctcacctctgcgccaggctgcggatgaggatgacaaggggatgaggagcgagactcctccagtacctcccccaccaccctatctggccagttatccaggctttcctgagaatggagcccctgggcccccaatctctcgctttcctctggaggaaccagggccccgtccactcccctggcccccaggcagtgatgaagtggccaagatacaaactccaccacccaagaaggagccccctaaggaggagactgcacagctgacggggccagaagcaggccgaaagcctgcccgcggagtcgggagtggaggccagggccccccaccaccacgcagagagagtcgcacagagacccgctggggccctcgtccagggagcagtcgtcgtggaatccctccagaggagccaggggccccaccccgccgggctgggcctataaagaaacctccaccacctacaaaagtagaagagctgcctcccaagcccctcgaacagggggatgaaacccccaaacccccaaagccagacccactcaagataaccaaggggaagctagggggccccaaggagaccccacccaatggaaatctttcccctgccccaaggcttcggagggactattcgtatgaaagagtgggtcctacctcttgccggggtcggggccgaggcgagtattttgccagagggaggggttttcgggggacctatgggggacgagggcggggagcccgaagccgggaattccgcagttaccgagagtttcgaggagatgatgggcgtggaggtgggacagggggaccaaaccaccctcctgctccccgaggccgcactgccagcgagacacggagcgagggttcagagtatgaggaaatccccaagcggcgccggcagcggggctcagaaacaggcagcgagacccatgagagtgatctggctccttcagacaaggaggctcccacacccaaggagggaacactcacccaggtccctctcgctcccccaccaccaggagccccaccttcaccagccccagcccgcttcactgcccggggtgggcgagtcttcactcccagaggggtgccatctcgccggggccgaggaggagggaggccccctcctcaagtttgcccaggctggagccctccagccaagtctctggctcccaagaaacctcccacaggccctttgccaccaagtaaggagcctttgaaagagaagttgatcccagggcctctgtcccctgtggcgcgcggaggcagcaatggaggtagcaatgtgggcatggaagatggggagcgaccccgaaggaggcgacatgggagggctcagcagcaggataaaccgcctcgtttccggaggctgaagcaggaacgggagaatgccgcaagggggtctgagggcaagccctccctaacccttccagcctccgctcctggacctgaggaggccctcacaacagtcacagtggccccagcacctcgccgggcagctgccaagtctcctgatctgtcaaaccagaactcagaccaagccaatgaggaatgggagactgcatcagagagcagtgacttcaccagtgagcgccgaggggacaaagaggcacccccaccagtactgctgacacccaaggctgtgggaactcctgggggaggtggaggtggagccgtaccaggtatttcagccatgtcccgcggagatctgagccagagagccaaggatttgagtaaacggagcttctcaagtcagcggccaggcatggaacggcagaatcggcgccctggcccagggggcaaggctggcagcagtggcagcagcagtggaggaggcggtgggggtcctggaggaaggaccgggccaggacgaggcgacaagaggagctggccctctcccaagaaccgaagtcgtcctccagaggagcgtcccccggggcttcccctgcctcccccacctcccagcagttctgctgtcttccgcctggaccaagttatccacagcaaccctgctggcatccaacaggctctggcccagcttagtagccgtcaagggagtgtaactgcaccagggggtcatccaaggcacaagcctgggcctccccaagcccctcagggcccctctcctaggcccccaacccgatacgagccccagagggtcaacagcggcctcagttctgacccccactttgaggagccggggccaatggtgagaggggtgggtgggactcctcgggactctgccggggttagtccctttccccctaaacgtcgggagcggcctcccagaaaaccagagctgctacaggaggaatctttgccacctcctcatagctctggattcttgggctctaagcctgagggcccaggccctcaggcagagtccagagatacaggcacagaggccctgacccctcacatctggaaccgtttacatactgccactagccgaaagagttaccggcccagctccatggagccttggatggagcccctgagtccttttgaggatgtggctggcacagaaatgagtcagtctgacagtggggtggacctgagtggggattctcaggtgtcatcaggtccctgcagccagcgaagttcccctgatggaggactcaagggggcagcagagggaccccccaagaggcctggaggctcctcacccctgaatgctgttccttgtgagggtccacctggctctgaacctcctaggagaccaccacctgccccccacgatggggacagaaaggagctgccccgggagcagcctctgccccctggccccattggcacagaacgatcacagcgtacagaccgaggcacagagcctggccccattcggccatcccatcgacctggtcccccagtccagtttggcactagtgacaaggactcagacttacgcctagtggtaggagacagcttgaaagcagagaaggagctaacagcatcagtcactgaggccattcctgtatcacgagactgggagctgcttcccagtgctgctgcctctgctgagccacaatccaagaacctggattctgggcactgtgtcccggagcccagctcctcaggccagcgcctgtatcctgaggttttctatggcagtgctgggccttccagttctcagatctctgggggagccatggactctcaattacatccaaacagtggaggcttccgccctgggacaccctcactgcacccttacagatcacagcccctatacctacccccgggcccagcccctccctcagcactgctctctggggtagctctcaagggccagtttctggatttctccacaatgcaagctacagagctggggaagttgccggctggaggagttctctaccctccaccttccttcctctactctccggctttctgccccagtcctttgcctgacacatcgttgcttcaggtacgccaggatctgccatccccttcggatttttattctactcctctgcagcctggtggccaaagtggatttctcccttcaggggctcctgcccagcagatgcttctacccatggtagactcacagctgcctgtggtgaactttggctccctgccgccagcaccacctcctgccccacctcccctttctctgttacctgtgggccctgctctgcagccccccagcctggctgtgcggcccccacctgctcctgctactcgggtgctgccttcacctgccaggcccttccccgctagcttggggcgagcagagctgcatccagtggaactaaagccgttccaggattatcaaaaactgagcagcaaccttgggggacctggatcatcacggactcccccaactggaaggtccttctctggcctcaattcccgtctcaaggccacgccttccacctacagtggagtcttccgcacccagcgcgtcgacctttaccagcaggcctccccaccagatgccctgcgctggatacctaagccttgggagcggacagggccgccacctcgagaagggccctcccgacgggcagaggagcctgggtcccgaggggacaaggagcctgggttgcccccaccccgctgagggagttcctcttgccccctacccccggggcttgtatatagattataaatatataagggggaaaggggtgggcggggaggggttgtggggctggggcctcacttcccctcctcccccttcccctggtcccctgtccctggggctgtttgttaaaaaagagtaataaaaggatttaaaaaaaaaaa

SEQ ID NO: 345155 - DNA, 6840 bp, Artificial Sequence
  derived and/or modified sequence
agggggtgctcccgggggcggcggttgcccggatgggccgttagtcggggctcagccgcggagtgagcgagggagacgggaggagccgaacccggcgccatccgccgccatcctcccccgccccaccgccatcccgtcccggggagcccctaggcccgggtcccggatccccgcgcacccggccaggctctggcacgttttgggggaggtgcctgcaggacccaacatactcaatgagcttccagcgcaatgtccgatcgctcggggccgactgccaagggaaaggatggaaagaagtattcctcgctcaacctgtttgatacgtataagggcaagtccttagagatccagaaacccgctgttgcccctcgccatggcctgcagagtctcgggaaagttgccattgcccggcgtatgccacctccagccaaccttccaagcctgaaagccgagaacaaaggcaatgaccccaatgtctcactagtgccaaaagacggaacaggatgggcaagcaaacaggagcagtccgaccccaagagttccgatgcctcaaccgctcagccgctggaatcgcagccactgccggcttcacagacgcctgcctccaaccagccgaaacgacccccagcagcccccgagaacactcctttggttccaagcggggtaaagtcctgggcacaagccagcgtcacccatggagcacatggagatggtggaagggcatcaagcctactgtcacgattctctcgagaggaatttccgaccctgcaggcggctggcgaccaggacaaggctgccaaggaaagggagtctgccgaacagtcgtctgggcccggaccaagcctccgcccccaaaattctacaacttggagggacggaggtgggcgtggccctgatgagctggagggcccggactccaaacttcatcatggtcatgatccccggggtgggctacagccttcaggcccaccccagttccctccctaccgcggaatgatgccgcctttcatgtatcccccatatctcccgttccctccgccctatggaccccaggggccttaccgataccccactcctgatgggcccagccgttttccccgtgtggcgggcccccgaggctcagggccaccaatgcgcttagtagagcctgtgggtcgtccctctattctcaaagaggataatctcaaagagtttgatcagttggatcaggagaatgatgatggttgggcaggggcccatgaagaggttgactacactgaaaagctcaagttcagcgatgaggaagatgggcgagactctgatgaggagggagctgagggccacagggattcccaatcagcttctggtgaggaacggccccctgaagcagatggcaaaaagggcaactcccccaacagcgaaccgcccactcctaagacggcctgggcagaaacctctcggcctccagagacagagccgggacctcctgccccaaagcctcccctacccccccctggggactacccagatcgtgggggtcctccctgcaagcccccagcacctgaagatgaggatgaggcatggcggcagcgacgaaagcagtcgtcatctgagatttccctggcagtggagcgggcccggcgacggcgagaagaagaggagcggcgcatgcaagaagagcgccgggcagcctgtgctgagaagctcaagcgactcgatgaaaagtttggggcacctgacaagcggctcaaagcagagcctgctgccccacctgctgccccttctaccccagctccaccacctgcagtccctaaagaactccctgcacctccagctccacctccagcatcagccccaacaccagagaaagaacctgaagagccagcacaggcccctcctgcccaatctactcctactccaggtgtggctgcggctcccactctggtgagtggtggtggcagtaccagtagcaccagcagtggcagcttcgaagccagcccagtggaaccacaactgccctcaaaagagggtcctgaaccaccagaagaggttcctcctcctaccacacccccagttccaaaggtggaacccaagggtgatgggattggtcccacccgccagccccctagtcagggcttgggctaccccaaatatcagaagtcgttgcctcctcgtttccagcggcagcagcaggagcagctcctgaagcagcagcagcagcaccagtggcagcagcatcaacagggctctgcccctcctaccccagtgcccccatcaccaccacagcctgtgaccctgggggctgtgccagctccacaggctccacccccgccccccaaggccctgtacccaggtgctctgggccggcccccacccatgcccccaatgaactttgatccccgatggatgatgattcctccttatgtggacccccggctcctccagggtcgtccccctctagacttctaccctcctggtgtgcatccctctggcctagttccccgagagcgttcagacagtgggggctcaagctcagagccatttgaccgtcatgcacctgctatgttacgggaacggggcactccaccggtggatccaaagttggcctgggtaggagatgtcttcaccgccacacccgctgaaccccgcccacttacctcacctctgcgccaggctgcggatgaggatgacaaggggatgaggagcgagactcctccagtacctcccccaccaccctatctggccagttatccaggctttcctgagaatggagcccctgggcccccaatctctcgctttcctctggaggaaccagggccccgtccactcccctggcccccaggcagtgatgaagtggccaagatacaaactccaccacccaagaaggagccccctaaggaggagactgcacagctgacggggccagaagcaggccgaaagcctgcccgcggagtcgggagtggaggccagggccccccaccaccacgcagagagagtcgcacagagacccgctggggccctcgtccagggagcagtcgtcgtggaatccctccagaggagccaggggccccaccccgccgggctgggcctataaagaaacctccaccacctacaaaagtagaagagctgcctcccaagcccctcgaacagggggatgaaacccccaaacccccaaagccagacccactcaagataaccaaggggaagctagggggccccaaggagaccccacccaatggaaatctttcccctgccccaaggcttcggagggactattcgtatgaaagagtgggtcctacctcttgccggggtcggggccgaggcgagtattttgccagagggaggggttttcgggggacctatgggggacgagggcggggagccgccgggaattccgcagttaccgagagtttcgaggagatgatgggcgtggaggtgggacagggggaccaaaccaccctcctgctccccgaggccgcactgccagcgagacacggagcgagggttcagagtatgaggaaatccccaagcggcgccggcagcggggctcagaaacaggcagcgagacccatgagagtgatctggctccttcagacaaggaggctcccacacccaaggagggaacactcacccaggtcccgctcccccaccaccaggagccccaccttcccagccccagcccgcttcactcccggggtgggcgagtcttcactcccagaggggatctcgccggggccgaggaggagggagcctcctcaagtttgcccaggctggagccctccagccaagtctctggctcccaagaaacctcccacaggccctttgccaccaagtaaggagcctttgaaagagaagttgatcccagggcctctgtcccctgtggcgcgcggaggcagcaatggaggtagcaatgtgggcatggaagatggggagcgaccccgaaggaggcgacatgggagggctcagcagcaggataaaccgcctcgtttccggaggctgaagcaggaacgggagaatgccgcaagggggtctgagggcaagccctccctaacccttccagcctccgctcctggacctgaggaggccctcacaacagtcacagtggccccagcacctcgccgggcagctgccaagtctcctgatctgtcaaaccagaactcagaccaagccaatgaggaatgggagactgcatcagagagcagtgacttcaccagtgagcgccgaggggacaaagaggcacccccaccagtactgctgacacccaaggctgtgggaactcctgggggaggtggaggtggagccgtaccaggtatttcagccatgtcccgcggagatctgagccagagagccaaggatttgagtaaacggagcttctcaagtcagcggccaggcatggaacggcagaatcggcgccctggcccagggggcaaggctggcagcagtggcagcagcagtggaggaggcggtgggggtcctggaggaaggaccgggccaggacgaggcgacaagaggagctggccctctcccaagaaccgaagtcgtcctccagaggagcgtcccccggggcttcccctgcctcccccacctcccagcagttctgctgtcttccgcctggaccaagttatccacagcaaccctgctggcatccaacaggctctggcccagcttagtagccgtcaagggagtgtaactgcaccagggggtcatccaaggcacaagcctgggcctccccaagcccctcagggcccctctcctaggcccccaacccgatacgagccccagagggtcaacagcggcctcagttctgacccccactttgaggagccggggccaatggtgagaggggtgggtgggactcctcgggactctgccggggttagtccctttccccctaaacgtcgggagcggcctcccagaaaaccagagctgctacaggaggaatctttgccacctcctcatagctctggattcttgggctctaagcctgagggcccaggccctcaggcagagtccagagatacaggcacagaggccctgacccctcacatctggaaccgtttacatactgccactagccgaaagagttaccggcccagctccatggagccttggatggagcccctgagtccttttgaggatgtggctggcacagaaatgagtcagtctgacagtggggtggacctgagtggggattctcaggtgtcatcaggtccctgcagccagcgaagttcccctgatggaggactcaagggggcagcagagggaccccccaagaggcctggaggctcctcacccctgaatgctgttccttgtgagggtccacctggctctgaacctcctaggagaccaccacctgccccccacgatggggacagaaaggagctgccccgggagcagcctctgccccctggccccattggcacagaacgatcacagcgtacagaccgaggcacagagcctggccccattcggccatcccatcgacctggtcccccagtccagtttggcactagtgacaaggactcagacttacgcctagtggtaggagacagcttgaaagcagagaaggagctaacagcatcagtcactgaggccattcctgtatcacgagactgggagctgcttcccagtgctgctgcctctgctgagccacaatccaagaacctggattctgggcactgtgtcccggagcccagctcctcaggccagcgcctgtatcctgaggttttctatggcagtgctgggccttccagttctcagatctctgggggacatggactctcaattacatccaaacagtggaggcgccctgggacaccctcactgcacccttacagatcacagcccctatacctaccccccggcccagcccctccctcagcactgctctctggggtagctctcaagggccagtttctggatttctccacaatgcaagctacagagctggggaagttgccggctggaggagttctctaccctccaccttccttcctctactctccggctttctgccccagtcctttgcctgacacatcgttgcttcaggtacgccaggatctgccatccccttcggatttttattctactcctctgcagcctggtggccaaagtggctttctcccttcaggggctcctgcccagcagatgcttctacccatggtagactcacagctgcctgtggtgaactttggctccctgccgccagcaccacctcctgccccacctcccctttctctgttacctgtgggccctgctctgcagccccccagcctggctgtgcggcccccacctgctcctgctactcgggtgctgccttcacctgccaggcccttccccgctagcttggggcgagcagagctgcatccagtggaactaaagccgttccaggattatcaaaaactgagcagcaaccttgggggacctggatcatcacggactcccccaactggaaggtccttctctggcctcaattcccgtctcaaggccacgccttccacctacagtggagtcttccgcacccagcgcgtcgacctttaccagcaggcctccccaccagatgccctgcgctggatacctaagccttgggagcggacagggccgccacctcgagaagggccctcccgacgggcagaggagcctgggtcccgaggggacaaggagcctgggttgcccccaccccgctgagggagttcctcttgccccctacccccggggcttgtatatagattataaatatataagggggaaaggggtgggcggggaggggttgtggggctggggcctcacttcccctcctcccccttcccctggtcccctgtccctggggctgtttgttaaaaaagagtaataaaaggattt

SEQ ID NO: 345156 - DNA, 6840 bp, Artificial Sequence
  derived and/or modified sequence
agggggtgctcccgggggcggcggttgcccggatgggccgttagtcggggctcagccgcggagtgagcgagggagacgggaggagccgaacccggcgccatccgccgccatcctcccccgccccaccgccatcccgtcccggggagcccctaggcccgggtcccggatccccgcgcacccggccaggctctggcacgttttgggggaggtgcctgcaggacccaacatactcaatgagcttccagcgcaatgtccgatcgctcggggccgactgccaagggaaaggatggaaagaagtattcctcgctcaacctgtttgatacgtataagggcaagtccttagagatccagaaacccgctgttgcccctcgccatggcctgcagagtctcgggaaagttgccattgcccggcgtatgccacctccagccaaccttccaagcctgaaagccgagaacaaaggcaatgaccccaatgtctcactagtgccaaaagacggaacaggatgggcaagcaaacaggagcagtccgaccccaagagttccgatgcctcaaccgctcagccgccggaatcgcagccactgccggcttcacagacgcctgcctccaaccagccgaaacgacccccagcagcccccgagaacactcctttggttccaagcggggtaaagtcctgggcacaagccagcgtcacccatggagcacatggagatggtggaagggcatcaagcctactgtcacgattctctcgagaggaatttccgaccctgcaggcggctggcgaccaggacaaggctgccaaggaaagggagtctgccgaacagtcgtctgggcccggaccaagcctccgcccccaaaattctacaacttggagggacggaggtgggcgtggccctgatgagctggagggcccggactccaaacttcatcatggtcatgatccccggggtgggctacagccttcaggcccaccccagttccctccctaccgcggaatgatgccgcctttcatgtatcccccatatctcccgttccctccgccctatggaccccaggggccttaccgataccccactcctgatgggcccagccgttttccccgtgtggcgggcccccgaggctcagggccaccaatgcgcttagtagagcctgtgggtcgtccctctattctcaaagaggataatctcaaagagtttgatcagttggatcaggagaatgatgatggttgggcaggggcccatgaagaggttgactacactgaaaagctcaagttcagcgatgaggaagatgggcgagactctgatgaggagggagctgagggccacagggattcccaatcagcttctggtgaggaacggccccctgaagcagatggcaaaaagggcaactcccccaacagcgaaccgcccactcctaagacggcctgggcagaaacctctcggcctccagagacagagccgggacctcctgccccaaagcctcccctacccccccctggggactacccagatcgtgggggtcctccctgcaagcccccagcacctgaagatgaggatgaggcatggcggcagcgacgaaagcagtcgtcatctgagatttccctggcagtggagcgggcccggcgacggcgagaagaagaggagcggcgcatgcaagaagagcgccgggcagcctgtgctgagaagctcaagcgactcgatgaaaagtttggggcacctgacaagcggctcaaagcagagcctgctgccccacctgctgccccttctaccccagctccaccacctgcagtccctaaagaactccctgcacctccagctccacctccagcatcagccccaacaccagagaaagaacctgaagagccagcacaggcccctcctgcccaatctactcctactccaggtgtggctgcggctcccactctggtgagtggtggtggcagtaccagtagcaccagcagtggcagcttcgaagccagcccagtggaaccacaactgccctcaaaagagggtcctgaaccaccagaagaggttcctcctcctaccacacccccagttccaaaggtggaacccaagggtgatgggattggtcccacccgccagccccctagtcagggcttgggctaccccaaatatcagaagtcgttgcctcctcgtttccagcggcagcagcaggagcagctcctgaagcagcagcagcagcaccagtggcagcagcatcaacagggctctgcccctcctaccccagtgcccccatcaccaccacagcctgtgaccctgggggctgtgccagctccacaggctccacccccgccccccaaggccctgtacccaggtgctctgggccggcccccacccatgcccccaatgaactttgatccccgatggatgatgattcctccttatgtggacccccggctcctccagggtcgtccccctctagacttctaccctcctggtgtgcatccctctggcctagttccccgagagcgttcagacagtgggggctcaagctcagagccatttgaccgtcatgcacctgctatgttacgggaacggggcactccaccggtggatccaaagttggcctgggtaggagatgtcttcaccgccacacccgctgaaccccgcccacttacctcacctctgcgccaggctgcggatgaggatgacaaggggatgaggagcgagactcctccagtacctcccccaccaccctatctggccagttatccaggctttcctgagaatggagcccctgggcccccaatctctcgctttcctctggaggaaccagggccccgtccactcccctggcccccaggcagtgatgaagtggccaagatacaaactccaccacccaagaaggagccccctaaggaggagactgcacagctgacggggccagaagcaggccgaaagcctgcccgcggagtcgggagtggaggccagggccccccaccaccacgcagagagagtcgcacagagacccgctggggccctcgtccagggagcagtcgtcgtggaatccctccagaggagccaggggccccaccccgccgggctgggcctataaagaaacctccaccacctacaaaagtagaagagctgcctcccaagcccctcgaacagggggatgaaacccccaaacccccaaagccagacccactcaagataaccaaggggaagctagggggccccaaggagaccccacccaatggaaatctttcccctgccccaaggcttcggagggactattcgtatgaaagagtgggtcctacctcttgccggggtcggggccgaggcgagtattttgccagagggaggggttttcgggggacctatgggggacgagggcggggagccgccgggaattccgcagttaccgagagtttcgaggagatgatgggcgtggaggtgggacagggggaccaaaccaccctcctgctccccgaggccgcactgccagcgagacacggagcgagggttcagagtatgaggaaatccccaagcggcgccggcagcggggctcagaaacaggcagcgagacccatgagagtgatctggctccttcagacaaggaggctcccacacccaaggagggaacactcacccaggtcccgctcccccaccaccaggagccccaccttcccagccccagcccgcttcactcccggggtgggcgagtcttcactcccagaggggatctcgccggggccgaggaggagggagcctcctcaagtttgcccaggctggagccctccagccaagtctctggctcccaagaaacctcccacaggccctttgccaccaagtaaggagcctttgaaagagaagttgatcccagggcctctgtcccctgtggcgcgcggaggcagcaatggaggtagcaatgtgggcatggaagatggggagcgaccccgaaggaggcgacatgggagggctcagcagcaggataaaccgcctcgtttccggaggctgaagcaggaacgggagaatgccgcaagggggtctgagggcaagccctccctaacccttccagcctccgctcctggacctgaggaggccctcacaacagtcacagtggccccagcacctcgccgggcagctgccaagtctcctgatctgtcaaaccagaactcagaccaagccaatgaggaatgggagactgcatcagagagcagtgacttcaccagtgagcgccgaggggacaaagaggcacccccaccagtactgctgacacccaaggctgtgggaactcctgggggaggtggaggtggagccgtaccaggtatttcagccatgtcccgcggagatctgagccagagagccaaggatttgagtaaacggagcttctcaagtcagcggccaggcatggaacggcagaatcggcgccctggcccagggggcaaggctggcagcagtggcagcagcagtggaggaggcggtgggggtcctggaggaaggaccgggccaggacgaggcgacaagaggagctggccctctcccaagaaccgaagtcgtcctccagaggagcgtcccccggggcttcccctgcctcccccacctcccagcagttctgctgtcttccgcctggaccaagttatccacagcaaccctgctggcatccaacaggctctggcccagcttagtagccgtcaagggagtgtaactgcaccagggggtcatccaaggcacaagcctgggcctccccaagcccctcagggcccctctcctaggcccccaacccgatacgagccccagagggtcaacagcggcctcagttctgacccccactttgaggagccggggccaatggtgagaggggtgggtgggactcctcgggactctgccggggttagtccctttccccctaaacgtcgggagcggcctcccagaaaaccagagctgctacaggaggaatctttgccacctcctcatagctctggattcttgggctctaagcctgagggcccaggccctcaggcagagtccagagatacaggcacagaggccctgacccctcacatctggaaccgtttacatactgccactagccgaaagagttaccggcccagctccatggagccttggatggagcccctgagtccttttgaggatgtggctggcacagaaatgagtcagtctgacagtggggtggacctgagtggggattctcaggtgtcatcaggtccctgcagccagcgaagttcccctgatggaggactcaagggggcagcagagggaccccccaagaggcctggaggctcctcacccctgaatgctgttccttgtgagggtccacctggctctgaacctcctaggagaccaccacctgccccccacgatggggacagaaaggagctgccccgggagcagcctctgccccctggccccattggcacagaacgatcacagcgtacagaccgaggcacagagcctggccccattcggccatcccatcgacctggtcccccagtccagtttggcactagtgacaaggactcagacttacgcctagtggtaggagacagcttgaaagcagagaaggagctaacagcatcagtcactgaggccattcctgtatcacgagactgggagctgcttcccagtgctgctgcctctgctgagccacaatccaagaacctggattctgggcactgtgtcccggagcccagctcctcaggccagcgcctgtatcctgaggttttctatggcagtgctgggccttccagttctcagatctctgggggacatggactctcaattacatccaaacagtggaggcgccctgggacaccctcactgcacccttacagatcacagcccctatacctacccccgggcccagcccctccctcagcactgctctctggggtagctctcaagggccagtttctggatttctccacaatgcaagctacagagctggggaagttgccggctggaggagttctctaccctccaccttccttcctctactctccggctttctgccccagtcctttgcctgacacatcgttgcttcaggtacgccaggatctgccatccccttcggatttttattctactcctctgcagcctggtggccaaagtggatttctcccttcaggggctcctgcccagcagatgcttctacccatggtagactcacagctgcctgtggtgaactttggctccctgccgccagcaccacctcctgccccacctcccctttctctgttacctgtgggccctgctctgcagccccccagcctggctgtgcggcccccacctgctcctgctactcgggtgctgccttcacctgccaggcccttccccgctagcttggggcgagcagagctgcatccagtggaactaaagccgttccaggattatcaaaaactgagcagcaaccttgggggacctggatcatcacggactcccccaactggaaggtccttctctggcctcaattcccgtctcaaggccacgccttccacctacagtggagtcttccgcacccagcgcgtcgacctttaccagcaggcctccccaccagatgccctgcgctggatacctaagccttgggagcggacagggccgccacctcgagaagggccctcccgacgggcagaggagcctgggtcccgaggggacaaggagcctgggttgcccccaccccgctgagggagttcctcttgccccctacccccggggcttgtatatagattataaatatataagggggaaaggggtgggcggggaggggttgtggggctggggcctcacttcccctcctcccccttcccctggtcccctgtccctggggctgtttgttaaaaaagagtaataaaaggattt

SEQ ID NO: 345157 - DNA, 6873 bp, Artificial Sequence
  derived and/or modified sequence
agggggtgctcccgggggcggcggttgcccggatgggccgttagtcggggctcagccgcggagtgagcgagggagacgggaggagccgaacccggcgccatccgccgccatcctcccccgccccaccgccatcccgtcccggggagcccctaggcccgggtcccggatccccgcgcacccggccaggctctggcacgttttgggggaggtgcctgcaggacccaacatactcaatgagcttccagcgcaatgtccgatcgctcggggccgactgccaagggaaaggatggaaagaagtattcctcgctcaacctgtttgatacgtataagggcaagtccttagagatccagaaacccgctgttgcccctcgccatggcctgcagagtctcgggaaagttgccattgcccggcgtatgccacctccagccaaccttccaagcctgaaagccgagaacaaaggcaatgaccccaatgtctcactagtgccaaaagacggaacaggatgggcaagcaaacaggagcagtccgaccccaagagttccgatgcctcaaccgctcagccgccggaatcgcagccactgccggcttcacagacgcctgcctccaaccagccgaaacgacccccagcagcccccgagaacactcctttggttccaagcggggtaaagtcctgggcacaagccagcgtcacccatggagcacatggagatggtggaagggcatcaagcctactgtcacgattctctcgagaggaatttccgaccctgcaggcggctggcgaccaggacaaggctgccaaggaaagggagtctgccgaacagtcgtctgggcccggaccaagcctccgcccccaaaattctacaacttggagggacggaggtgggcgtggccctgatgagctggagggcccggactccaaacttcatcatggtcatgatccccggggtgggctacagccttcaggcccaccccagttccctccctaccgcggaatgatgccgcctttcatgtatcccccatatctcccgttccctccgccctatggaccccaggggccttaccgataccccactcctgatgggcccagccgttttccccgtgtggcgggcccccgaggctcagggccaccaatgcgcttagtagagcctgtgggtcgtccctctattctcaaagaggataatctcaaagagtttgatcagttggatcaggagaatgatgatggttgggcaggggcccatgaagaggttgactacactgaaaagctcaagttcagcgatgaggaagatgggcgagactctgatgaggagggagctgagggccacagggattcccaatcagcttctggtgaggaacggccccctgaagcagatggcaaaaagggcaactcccccaacagcgaaccgcccactcctaagacggcctgggcagaaacctctcggcctccagagacagagccgggacctcctgccccaaagcctcccctacccccacctcaccggggccccgccgggaactggggcccccctggggactacccagatcgtgggggtcctccctgcaagcccccagcacctgaagatgaggatgaggcatggcggcagcgacgaaagcagtcgtcatctgagatttccctggcagtggagcgggcccggcgacggcgagaagaagaggagcggcgcatgcaagaagagcgccgggcagcctgtgctgagaagctcaagcgactcgatgaaaagtttggggcacctgacaagcggctcaaagcagagcctgctgccccacctgctgccccttctaccccagctccaccacctgcagtccctaaagaactccctgcacctccagctccacctccagcatcagccccaacaccagagaaagaacctgaagagccagcacaggcccctcctgcccaatctactcctactccaggtgtggctgcggctcccactctggtgagtggtggtggcagtaccagtagcaccagcagtggcagcttcgaagccagcccagtggaaccacaactgccctcaaaagagggtcctgaaccaccagaagaggttcctcctcctaccacacccccagttccaaaggtggaacccaagggtgatgggattggtcccacccgccagccccctagtcagggcttgggctaccccaaatatcagaagtcgttgcctcctcgtttccagcggcagcagcaggagcagctcctgaagcagcagcagcagcaccagtggcagcagcatcaacagggctctgcccctcctaccccagtgcccccatcaccaccacagcctgtgaccctgggggctgtgccagctccacaggctccacccccgccccccaaggccctgtacccaggtgctctgggccggcccccacccatgcccccaatgaactttgatccccgatggatgatgattcctccttatgtggacccccggctcctccagggtcgtccccctctagacttctaccctcctggtgtgcatccctctggcctagttccccgagagcgttcagacagtgggggctcaagctcagagccatttgaccgtcatgcacctgctatgttacgggaacggggcactccaccggtggatccaaagttggcctgggtaggagatgtcttcaccgccacacccgctgaaccccgcccacttacctcacctctgcgccaggctgcggatgaggatgacaaggggatgaggagcgagactcctccagtacctcccccaccaccctatctggccagttatccaggctttcctgagaatggagcccctgggcccccaatctctcgctttcctctggaggaaccagggccccgtccactcccctggcccccaggcagtgatgaagtggccaagatacaaactccaccacccaagaaggagccccctaaggaggagactgcacagctgacggggccagaagcaggccgaaagcctgcccgcggagtcgggagtggaggccagggccccccaccaccacgcagagagagtcgcacagagacccgctggggccctcgtccagggagcagtcgtcgtggaatccctccagaggagccaggggccccaccccgccgggctgggcctataaagaaacctccaccacctacaaaagtagaagagctgcctcccaagcccctcgaacagggggatgaaacccccaaacccccaaagccagacccactcaagataaccaaggggaagctagggggccccaaggagaccccacccaatggaaatctttcccctgccccaaggcttcggagggactattcgtatgaaagagtgggtcctacctcttgccggggtcggggccgaggcgagtattttgccagagggaggggttttcgggggacctatgggggacgagggcggggagccgccgggaattccgcagttaccgagagtttcgaggagatgatgggcgtggaggtgggacagggggaccaaaccaccctcctgctccccgaggccgcactgccagcgagacacggagcgagggttcagagtatgaggaaatccccaagcggcgccggcagcggggctcagaaacaggcagcgagacccatgagagtgatctggctccttcagacaaggaggctcccacacccaaggagggaacactcacccaggtcccgctcccccaccaccaggagccccaccttcccagccccagcccgcttcactcccggggtgggcgagtcttcactcccagaggggatctcgccggggccgaggaggagggagcctcctcaagtttgcccaggctggagccctccagccaagtctctggctcccaagaaacctcccacaggccctttgccaccaagtaaggagcctttgaaagagaagttgatcccagggcctctgtcccctgtggcgcgcggaggcagcaatggaggtagcaatgtgggcatggaagatggggagcgaccccgaaggaggcgacatgggagggctcagcagcaggataaaccgcctcgtttccggaggctgaagcaggaacgggagaatgccgcaagggggtctgagggcaagccctccctaacccttccagcctccgctcctggacctgaggaggccctcacaacagtcacagtggccccagcacctcgccgggcagctgccaagtctcctgatctgtcaaaccagaactcagaccaagccaatgaggaatgggagactgcatcagagagcagtgacttcaccagtgagcgccgaggggacaaagaggcacccccaccagtactgctgacacccaaggctgtgggaactcctgggggaggtggaggtggagccgtaccaggtatttcagccatgtcccgcggagatctgagccagagagccaaggatttgagtaaacggagcttctcaagtcagcggccaggcatggaacggcagaatcggcgccctggcccagggggcaaggctggcagcagtggcagcagcagtggaggaggcggtgggggtcctggaggaaggaccgggccaggacgaggcgacaagaggagctggccctctcccaagaaccgaagtcgtcctccagaggagcgtcccccggggcttcccctgcctcccccacctcccagcagttctgctgtcttccgcctggaccaagttatccacagcaaccctgctggcatccaacaggctctggcccagcttagtagccgtcaagggagtgtaactgcaccagggggtcatccaaggcacaagcctgggcctccccaagcccctcagggcccctctcctaggcccccaacccgatacgagccccagagggtcaacagcggcctcagttctgacccccactttgaggagccggggccaatggtgagaggggtgggtgggactcctcgggactctgccggggttagtccctttccccctaaacgtcgggagcggcctcccagaaaaccagagctgctacaggaggaatctttgccacctcctcatagctctggattcttgggctctaagcctgagggcccaggccctcaggcagagtccagagatacaggcacagaggccctgacccctcacatctggaaccgtttacatactgccactagccgaaagagttaccggcccagctccatggagccttggatggagcccctgagtccttttgaggatgtggctggcacagaaatgagtcagtctgacagtggggtggacctgagtggggattctcaggtgtcatcaggtccctgcagccagcgaagttcccctgatggaggactcaagggggcagcagagggaccccccaagaggcctggaggctcctcacccctgaatgctgttccttgtgagggtccacctggctctgaacctcctaggagaccaccacctgccccccacgatggggacagaaaggagctgccccgggagcagcctctgccccctggccccattggcacagaacgatcacagcgtacagaccgaggcacagagcctggccccattcggccatcccatcgacctggtcccccagtccagtttggcactagtgacaaggactcagacttacgcctagtggtaggagacagcttgaaagcagagaaggagctaacagcatcagtcactgaggccattcctgtatcacgagactgggagctgcttcccagtgctgctgcctctgctgagccacaatccaagaacctggattctgggcactgtgtcccggagcccagctcctcaggccagcgcctgtatcctgaggttttctatggcagtgctgggccttccagttctcagatctctgggggacatggactctcaattacatccaaacagtggaggcgccctgggacaccctcactgcacccttacagatcacagcccctatacctacccccgggcccagcccctccctcagcactgctctctggggtagctctcaagggccagtttctggatttctccacaatgcaagctacagagctggggaagttgccggctggaggagttctctaccctccaccttccttcctctactctccggctttctgccccagtcctttgcctgacacatcgttgcttcaggtacgccaggatctgccatccccttcggatttttattctactcctctgcagcctggtggccaaagtggatttctcccttcaggggctcctgcccagcagatgcttctacccatggtagactcacagctgcctgtggtgaactttggctccctgccgccagcaccacctcctgccccacctcccctttctctgttacctgtgggccctgctctgcagccccccagcctggctgtgcggcccccacctgctcctgctactcgggtgctgccttcacctgccaggcccttccccgctagcttggggcgagcagagctgcatccagtggaactaaagccgttccaggattatcaaaaactgagcagcaaccttgggggacctggatcatcacggactcccccaactggaaggtccttctctggcctcaattcccgtctcaaggccacgccttccacctacagtggagtcttccgcacccagcgcgtcgacctttaccagcaggcctccccaccagatgccctgcgctggatacctaagccttgggagcggacagggccgccacctcgagaagggccctcccgacgggcagaggagcctgggtcccgaggggacaaggagcctgggttgcccccaccccgctgagggagttcctcttgccccctacccccggggcttgtatatagattataaatatataagggggaaaggggtgggcggggaggggttgtggggctggggcctcacttcccctcctcccccttcccctggtcccctgtccctggggctgtttgttaaaaaagagtaataaaaggattt

SEQ ID NO: 345158 - DNA, 6873 bp, Artificial Sequence
  derived and/or modified sequence
agggggtgctcccgggggcggcggttgcccggatgggccgttagtcggggctcagccgcggagtgagcgagggagacgggaggagccgaacccggcgccatccgccgccatcctcccccgccccaccgccatcccgtcccggggagcccctaggcccgggtcccggatccccgcgcacccggccaggctctggcacgttttgggggaggtgcctgcaggacccaacatactcaatgagcttccagcgcaatgtccgatcgctcggggccgactgccaagggaaaggatggaaagaagtattcctcgctcaacctgtttgatacgtataagggcaagtccttagagatccagaaacccgctgttgcccctcgccatggcctgcagagtctcgggaaagttgccattgcccggcgtatgccacctccagccaaccttccaagcctgaaagccgagaacaaaggcaatgaccccaatgtctcactagtgccaaaagacggaacaggatgggcaagcaaacaggagcagtccgaccccaagagttccgatgcctcaaccgctcagccgctggaatcgcagccactgccggcttcacagacgcctgcctccaaccagccgaaacgacccccagcagcccccgagaacactcctttggttccaagcggggtaaagtcctgggcacaagccagcgtcacccatggagcacatggagatggtggaagggcatcaagcctactgtcacgattctctcgagaggaatttccgaccctgcaggcggctggcgaccaggacaaggctgccaaggaaagggagtctgccgaacagtcgtctgggcccggaccaagcctccgcccccaaaattctacaacttggagggacggaggtgggcgtggccctgatgagctggagggcccggactccaaacttcatcatggtcatgatccccggggtgggctacagccttcaggcccaccccagttccctccctaccgcggaatgatgccgcctttcatgtatcccccatatctcccgttccctccgccctatggaccccaggggccttaccgataccccactcctgatgggcccagccgttttccccgtgtggcgggcccccgaggctcagggccaccaatgcgcttagtagagcctgtgggtcgtccctctattctcaaagaggataatctcaaagagtttgatcagttggatcaggagaatgatgatggttgggcaggggcccatgaagaggttgactacactgaaaagctcaagttcagcgatgaggaagatgggcgagactctgatgaggagggagctgagggccacagggattcccaatcagcttctggtgaggaacggccccctgaagcagatggcaaaaagggcaactcccccaacagcgaaccgcccactcctaagacggcctgggcagaaacctctcggcctccagagacagagccgggacctcctgccccaaagcctcccctacccccacctcaccggggccccgccgggaactggggcccccctggggactacccagatcgtgggggtcctccctgcaagcccccagcacctgaagatgaggatgaggcatggcggcagcgacgaaagcagtcgtcatctgagatttccctggcagtggagcgggcccggcgacggcgagaagaagaggagcggcgcatgcaagaagagcgccgggcagcctgtgctgagaagctcaagcgactcgatgaaaagtttggggcacctgacaagcggctcaaagcagagcctgctgccccacctgctgccccttctaccccagctccaccacctgcagtccctaaagaactccctgcacctccagctccacctccagcatcagccccaacaccagagaaagaacctgaagagccagcacaggcccctcctgcccaatctactcctactccaggtgtggctgcggctcccactctggtgagtggtggtggcagtaccagtagcaccagcagtggcagcttcgaagccagcccagtggaaccacaactgccctcaaaagagggtcctgaaccaccagaagaggttcctcctcctaccacacccccagttccaaaggtggaacccaagggtgatgggattggtcccacccgccagccccctagtcagggcttgggctaccccaaatatcagaagtcgttgcctcctcgtttccagcggcagcagcaggagcagctcctgaagcagcagcagcagcaccagtggcagcagcatcaacagggctctgcccctcctaccccagtgcccccatcaccaccacagcctgtgaccctgggggctgtgccagctccacaggctccacccccgccccccaaggccctgtacccaggtgctctgggccggcccccacccatgcccccaatgaactttgatccccgatggatgatgattcctccttatgtggacccccggctcctccagggtcgtccccctctagacttctaccctcctggtgtgcatccctctggcctagttccccgagagcgttcagacagtgggggctcaagctcagagccatttgaccgtcatgcacctgctatgttacgggaacggggcactccaccggtggatccaaagttggcctgggtaggagatgtcttcaccgccacacccgctgaaccccgcccacttacctcacctctgcgccaggctgcggatgaggatgacaaggggatgaggagcgagactcctccagtacctcccccaccaccctatctggccagttatccaggctttcctgagaatggagcccctgggcccccaatctctcgctttcctctggaggaaccagggccccgtccactcccctggcccccaggcagtgatgaagtggccaagatacaaactccaccacccaagaaggagccccctaaggaggagactgcacagctgacggggccagaagcaggccgaaagcctgcccgcggagtcgggagtggaggccagggccccccaccaccacgcagagagagtcgcacagagacccgctggggccctcgtccagggagcagtcgtcgtggaatccctccagaggagccaggggccccaccccgccgggctgggcctataaagaaacctccaccacctacaaaagtagaagagctgcctcccaagcccctcgaacagggggatgaaacccccaaacccccaaagccagacccactcaagataaccaaggggaagctagggggccccaaggagaccccacccaatggaaatctttcccctgccccaaggcttcggagggactattcgtatgaaagagtgggtcctacctcttgccggggtcggggccgaggcgagtattttgccagagggaggggttttcgggggacctatgggggacgagggcggggagccgccgggaattccgcagttaccgagagtttcgaggagatgatgggcgtggaggtgggacagggggaccaaaccaccctcctgctccccgaggccgcactgccagcgagacacggagcgagggttcagagtatgaggaaatccccaagcggcgccggcagcggggctcagaaacaggcagcgagacccatgagagtgatctggctccttcagacaaggaggctcccacacccaaggagggaacactcacccaggtcccgctcccccaccaccaggagccccaccttcccagccccagcccgcttcactcccggggtgggcgagtcttcactcccagaggggatctcgccggggccgaggaggagggagcctcctcaagtttgcccaggctggagccctccagccaagtctctggctcccaagaaacctcccacaggccctttgccaccaagtaaggagcctttgaaagagaagttgatcccagggcctctgtcccctgtggcgcgcggaggcagcaatggaggtagcaatgtgggcatggaagatggggagcgaccccgaaggaggcgacatgggagggctcagcagcaggataaaccgcctcgtttccggaggctgaagcaggaacgggagaatgccgcaagggggtctgagggcaagccctccctaacccttccagcctccgctcctggacctgaggaggccctcacaacagtcacagtggccccagcacctcgccgggcagctgccaagtctcctgatctgtcaaaccagaactcagaccaagccaatgaggaatgggagactgcatcagagagcagtgacttcaccagtgagcgccgaggggacaaagaggcacccccaccagtactgctgacacccaaggctgtgggaactcctgggggaggtggaggtggagccgtaccaggtatttcagccatgtcccgcggagatctgagccagagagccaaggatttgagtaaacggagcttctcaagtcagcggccaggcatggaacggcagaatcggcgccctggcccagggggcaaggctggcagcagtggcagcagcagtggaggaggcggtgggggtcctggaggaaggaccgggccaggacgaggcgacaagaggagctggccctctcccaagaaccgaagtcgtcctccagaggagcgtcccccggggcttcccctgcctcccccacctcccagcagttctgctgtcttccgcctggaccaagttatccacagcaaccctgctggcatccaacaggctctggcccagcttagtagccgtcaagggagtgtaactgcaccagggggtcatccaaggcacaagcctgggcctccccaagcccctcagggcccctctcctaggcccccaacccgatacgagccccagagggtcaacagcggcctcagttctgacccccactttgaggagccggggccaatggtgagaggggtgggtgggactcctcgggactctgccggggttagtccctttccccctaaacgtcgggagcggcctcccagaaaaccagagctgctacaggaggaatctttgccacctcctcatagctctggattcttgggctctaagcctgagggcccaggccctcaggcagagtccagagatacaggcacagaggccctgacccctcacatctggaaccgtttacatactgccactagccgaaagagttaccggcccagctccatggagccttggatggagcccctgagtccttttgaggatgtggctggcacagaaatgagtcagtctgacagtggggtggacctgagtggggattctcaggtgtcatcaggtccctgcagccagcgaagttcccctgatggaggactcaagggggcagcagagggaccccccaagaggcctggaggctcctcacccctgaatgctgttccttgtgagggtccacctggctctgaacctcctaggagaccaccacctgccccccacgatggggacagaaaggagctgccccgggagcagcctctgccccctggccccattggcacagaacgatcacagcgtacagaccgaggcacagagcctggccccattcggccatcccatcgacctggtcccccagtccagtttggcactagtgacaaggactcagacttacgcctagtggtaggagacagcttgaaagcagagaaggagctaacagcatcagtcactgaggccattcctgtatcacgagactgggagctgcttcccagtgctgctgcctctgctgagccacaatccaagaacctggattctgggcactgtgtcccggagcccagctcctcaggccagcgcctgtatcctgaggttttctatggcagtgctgggccttccagttctcagatctctgggggacatggactctcaattacatccaaacagtggaggcgccctgggacaccctcactgcacccttacagatcacagcccctatacctaccccccggcccagcccctccctcagcactgctctctggggtagctctcaagggccagtttctggatttctccacaatgcaagctacagagctggggaagttgccggctggaggagttctctaccctccaccttccttcctctactctccggctttctgccccagtcctttgcctgacacatcgttgcttcaggtacgccaggatctgccatccccttcggatttttattctactcctctgcagcctggtggccaaagtggctttctcccttcaggggctcctgcccagcagatgcttctacccatggtagactcacagctgcctgtggtgaactttggctccctgccgccagcaccacctcctgccccacctcccctttctctgttacctgtgggccctgctctgcagccccccagcctggctgtgcggcccccacctgctcctgctactcgggtgctgccttcacctgccaggcccttccccgctagcttggggcgagcagagctgcatccagtggaactaaagccgttccaggattatcaaaaactgagcagcaaccttgggggacctggatcatcacggactcccccaactggaaggtccttctctggcctcaattcccgtctcaaggccacgccttccacctacagtggagtcttccgcacccagcgcgtcgacctttaccagcaggcctccccaccagatgccctgcgctggatacctaagccttgggagcggacagggccgccacctcgagaagggccctcccgacgggcagaggagcctgggtcccgaggggacaaggagcctgggttgcccccaccccgctgagggagttcctcttgccccctacccccggggcttgtatatagattataaatatataagggggaaaggggtgggcggggaggggttgtggggctggggcctcacttcccctcctcccccttcccctggtcccctgtccctggggctgtttgttaaaaaagagtaataaaaggattt

SEQ ID NO: 345159 - DNA, 4303 bp, Artificial Sequence
  derived and/or modified sequence
ttcttcaggcctagttccccgagagcgttcagacagtgggggctcaagctcagagccatttgaccgtcatgcacctgctatgttacgggaacggggcactccaccggtggatccaaagttggcctgggtaggagatgtcttcaccgccacacccgctgaaccccgcccacttacctcacctctgcgccaggctgcggatgaggatgacaaggggatgaggagcgagactcctccagtacctcccccaccaccctatctggccagttatccaggctttcctgagaatggagcccctgggcccccaatctctcgctttcctctggaggaaccagggccccgtccactcccctggcccccaggcagtgatgaagtggccaagatacaaactccaccacccaagaaggagccccctaaggaggagactgcacagctgacggggccagaagcaggccgaaagcctgcccgcggagtcgggagtggaggccagggccccccaccaccacgcagagagagtcgcacagagacccgctggggccctcgtccagggagcagtcgtcgtggaatccctccagaggagccaggggccccaccccgccgggctgggcctataaagaaacctccaccacctacaaaagtagaagagctgcctcccaagcccctcgaacagggggatgaaacccccaaacccccaaagccagacccactcaagataaccaaggggaagctagggggccccaaggagaccccacccaatggaaatctttcccctgccccaaggcttcggagggactattcgtatgaaagagtgggtcctacctcttgccggggtcggggccgaggcgagtattttgccagagggaggggttttcgggggacctatgggggacgagggcggggagcccgaagccgggaattccgcagttaccgagagtttcgaggagatgatgggcgtggaggtgggacagggggaccaaaccaccctcctgctccccgaggccgcactgccagcgagacacggagcgagggttcagagtatgaggaaatccccaagcggcgccggcagcggggctcagaaacaggcagcgagacccatgagagtgatctggctccttcagacaaggaggctcccacacccaaggagggaacactcacccaggtccctctcgctcccccaccaccaggagccccaccttcaccagccccagcccgcttcactgcccggggtgggcgagtcttcactcccagaggggtgccatctcgccggggccgaggaggagggaggccccctcctcaagtttgcccaggctggagccctccagccaagtctctggctcccaagaaacctcccacaggccctttgccaccaagtaaggagcctttgaaagagaagttgatcccagggcctctgtcccctgtggcgcgcggaggcagcaatggaggtagcaatgtgggcatggaagatggggagcgaccccgaaggaggcgacatgggagggctcagcagcaggataaaccgcctcgtttccggaggctgaagcaggaacgggagaatgccgcaagggggtctgagggcaagccctccctaacccttccagcctccgctcctggacctgaggaggccctcacaacagtcacagtggccccagcacctcgccgggcagctgccaagtctcctgatctgtcaaaccagaactcagaccaagccaatgaggaatgggagactgcatcagagagcagtgacttcaccagtgagcgccgaggggacaaagaggcacccccaccagtactgctgacacccaaggctgtgggaactcctgggggaggtggaggtggagccgtaccaggtatttcagccatgtcccgcggagatctgagccagagagccaaggatttgagtaaacggagcttctcaagtcagcggccaggcatggaacggcagaatcggcgccctggcccagggggcaaggctggcagcagtggcagcagcagtggaggaggcggtgggggtcctggaggaaggaccgggccaggacgaggcgacaagaggagctggccctctcccaagaaccgaagtcgtcctccagaggagcgtcccccggggcttcccctgcctcccccacctcccagcagttctgctgtcttccgcctggaccaagttatccacagcaaccctgctggcatccaacaggctctggcccagcttagtagccgtcaagggagtgtaactgcaccagggggtcatccaaggcacaagcctgggcctccccaagcccctcagggcccctctcctaggcccccaacccgatacgagccccagagggtcaacagcggcctcagttctgacccccactttgaggagccggggccaatggtgagaggggtgggtgggactcctcgggactctgccggggttagtccctttccccctaaacgtcgggagcggcctcccagaaaaccagagctgctacaggaggaatctttgccacctcctcatagctctggattcttgggctctaagcctgagggcccaggccctcaggcagagtccagagatacaggcacagaggccctgacccctcacatctggaaccgtttacatactgccactagccgaaagagttaccggcccagctccatggagccttggatggagcccctgagtccttttgaggatgtggctggcacagaaatgagtcagtctgacagtggggtggacctgagtggggattctcaggtgtcatcaggtccctgcagccagcgaagttcccctgatggaggactcaagggggcagcagagggaccccccaagaggcctggaggctcctcacccctgaatgctgttccttgtgagggtccacctggctctgaacctcctaggagaccaccacctgccccccacgatggggacagaaaggagctgccccgggagcagcctctgccccctggccccattggcacagaacgatcacagcgtacagaccgaggcacagagcctggccccattcggccatcccatcgacctggtcccccagtccagtttggcactagtgacaaggactcagacttacgcctagtggtaggagacagcttgaaagcagagaaggagctaacagcatcagtcactgaggccattcctgtatcacgagactgggagctgcttcccagtgctgctgcctctgctgagccacaatccaagaacctggattctgggcactgtgtcccggagcccagctcctcaggccagcgcctgtatcctgaggttttctatggcagtgctgggccttccagttctcagatctctgggggagccatggactctcaattacatccaaacagtggaggcttccgccctgggacaccctcactgcacccttacagatcacagcccctatacctaccccccggcccagcccctccctcagcactgctctctggggtagctctcaagggccagtttctggatttctccacaatgcaagctacagagctggggaagttgccggctggaggagttctctaccctccaccttccttcctctactctccggctttctgccccagtcctttgcctgacacatcgttgcttcaggtacgccaggatctgccatccccttcggatttttattctactcctctgcagcctggtggccaaagtggctttctcccttcaggggctcctgcccagcagatgcttctacccatggtagactcacagctgcctgtggtgaactttggctccctgccgccagcaccacctcctgccccacctcccctttctctgttacctgtgggccctgctctgcagccccccagcctggctgtgcggcccccacctgctcctgctactcgggtgctgccttcacctgccaggcccttccccgctagcttggggcgagcagagctgcatccagtggaactaaagccgttccaggattatcaaaaactgagcagcaaccttgggggacctggatcatcacggactcccccaactggaaggtccttctctggcctcaattcccgtctcaaggccacgccttccacctacagtggagtcttccgcacccagcgcgtcgacctttaccagcaggcctccccaccagatgccctgcgctggatacctaagccttgggagcggacagggccgccacctcgagaagggccctcccgacgggcagaggagcctgggtcccgaggggacaaggagcctgggttgcccccaccccgctgagggagttcctcctcccccttcccctggtcccctgtccctggggctgtttgttaaaaaagagtaataaaaggattt

SEQ ID NO: 345160 - DNA, 4303 bp, Artificial Sequence
  derived and/or modified sequence
ttcttcaggcctagttccccgagagcgttcagacagtgggggctcaagctcagagccatttgaccgtcatgcacctgctatgttacgggaacggggcactccaccggtggatccaaagttggcctgggtaggagatgtcttcaccgccacacccgctgaaccccgcccacttacctcacctctgcgccaggctgcggatgaggatgacaaggggatgaggagcgagactcctccagtacctcccccaccaccctatctggccagttatccaggctttcctgagaatggagcccctgggcccccaatctctcgctttcctctggaggaaccagggccccgtccactcccctggcccccaggcagtgatgaagtggccaagatacaaactccaccacccaagaaggagccccctaaggaggagactgcacagctgacggggccagaagcaggccgaaagcctgcccgcggagtcgggagtggaggccagggccccccaccaccacgcagagagagtcgcacagagacccgctggggccctcgtccagggagcagtcgtcgtggaatccctccagaggagccaggggccccaccccgccgggctgggcctataaagaaacctccaccacctacaaaagtagaagagctgcctcccaagcccctcgaacagggggatgaaacccccaaacccccaaagccagacccactcaagataaccaaggggaagctagggggccccaaggagaccccacccaatggaaatctttcccctgccccaaggcttcggagggactattcgtatgaaagagtgggtcctacctcttgccggggtcggggccgaggcgagtattttgccagagggaggggttttcgggggacctatgggggacgagggcggggagcccgaagccgggaattccgcagttaccgagagtttcgaggagatgatgggcgtggaggtgggacagggggaccaaaccaccctcctgctccccgaggccgcactgccagcgagacacggagcgagggttcagagtatgaggaaatccccaagcggcgccggcagcggggctcagaaacaggcagcgagacccatgagagtgatctggctccttcagacaaggaggctcccacacccaaggagggaacactcacccaggtccctctcgctcccccaccaccaggagccccaccttcaccagccccagcccgcttcactgcccggggtgggcgagtcttcactcccagaggggtgccatctcgccggggccgaggaggagggaggccccctcctcaagtttgcccaggctggagccctccagccaagtctctggctcccaagaaacctcccacaggccctttgccaccaagtaaggagcctttgaaagagaagttgatcccagggcctctgtcccctgtggcgcgcggaggcagcaatggaggtagcaatgtgggcatggaagatggggagcgaccccgaaggaggcgacatgggagggctcagcagcaggataaaccgcctcgtttccggaggctgaagcaggaacgggagaatgccgcaagggggtctgagggcaagccctccctaacccttccagcctccgctcctggacctgaggaggccctcacaacagtcacagtggccccagcacctcgccgggcagctgccaagtctcctgatctgtcaaaccagaactcagaccaagccaatgaggaatgggagactgcatcagagagcagtgacttcaccagtgagcgccgaggggacaaagaggcacccccaccagtactgctgacacccaaggctgtgggaactcctgggggaggtggaggtggagccgtaccaggtatttcagccatgtcccgcggagatctgagccagagagccaaggatttgagtaaacggagcttctcaagtcagcggccaggcatggaacggcagaatcggcgccctggcccagggggcaaggctggcagcagtggcagcagcagtggaggaggcggtgggggtcctggaggaaggaccgggccaggacgaggcgacaagaggagctggccctctcccaagaaccgaagtcgtcctccagaggagcgtcccccggggcttcccctgcctcccccacctcccagcagttctgctgtcttccgcctggaccaagttatccacagcaaccctgctggcatccaacaggctctggcccagcttagtagccgtcaagggagtgtaactgcaccagggggtcatccaaggcacaagcctgggcctccccaagcccctcagggcccctctcctaggcccccaacccgatacgagccccagagggtcaacagcggcctcagttctgacccccactttgaggagccggggccaatggtgagaggggtgggtgggactcctcgggactctgccggggttagtccctttccccctaaacgtcgggagcggcctcccagaaaaccagagctgctacaggaggaatctttgccacctcctcatagctctggattcttgggctctaagcctgagggcccaggccctcaggcagagtccagagatacaggcacagaggccctgacccctcacatctggaaccgtttacatactgccactagccgaaagagttaccggcccagctccatggagccttggatggagcccctgagtccttttgaggatgtggctggcacagaaatgagtcagtctgacagtggggtggacctgagtggggattctcaggtgtcatcaggtccctgcagccagcgaagttcccctgatggaggactcaagggggcagcagagggaccccccaagaggcctggaggctcctcacccctgaatgctgttccttgtgagggtccacctggctctgaacctcctaggagaccaccacctgccccccacgatggggacagaaaggagctgccccgggagcagcctctgccccctggccccattggcacagaacgatcacagcgtacagaccgaggcacagagcctggccccattcggccatcccatcgacctggtcccccagtccagtttggcactagtgacaaggactcagacttacgcctagtggtaggagacagcttgaaagcagagaaggagctaacagcatcagtcactgaggccattcctgtatcacgagactgggagctgcttcccagtgctgctgcctctgctgagccacaatccaagaacctggattctgggcactgtgtcccggagcccagctcctcaggccagcgcctgtatcctgaggttttctatggcagtgctgggccttccagttctcagatctctgggggagccatggactctcaattacatccaaacagtggaggcttccgccctgggacaccctcactgcacccttacagatcacagcccctatacctacccccgggcccagcccctccctcagcactgctctctggggtagctctcaagggccagtttctggatttctccacaatgcaagctacagagctggggaagttgccggctggaggagttctctaccctccaccttccttcctctactctccggctttctgccccagtcctttgcctgacacatcgttgcttcaggtacgccaggatctgccatccccttcggatttttattctactcctctgcagcctggtggccaaagtggatttctcccttcaggggctcctgcccagcagatgcttctacccatggtagactcacagctgcctgtggtgaactttggctccctgccgccagcaccacctcctgccccacctcccctttctctgttacctgtgggccctgctctgcagccccccagcctggctgtgcggcccccacctgctcctgctactcgggtgctgccttcacctgccaggcccttccccgctagcttggggcgagcagagctgcatccagtggaactaaagccgttccaggattatcaaaaactgagcagcaaccttgggggacctggatcatcacggactcccccaactggaaggtccttctctggcctcaattcccgtctcaaggccacgccttccacctacagtggagtcttccgcacccagcgcgtcgacctttaccagcaggcctccccaccagatgccctgcgctggatacctaagccttgggagcggacagggccgccacctcgagaagggccctcccgacgggcagaggagcctgggtcccgaggggacaaggagcctgggttgcccccaccccgctgagggagttcctcctcccccttcccctggtcccctgtccctggggctgtttgttaaaaaagagtaataaaaggattt

SEQ ID NO: 345161 - DNA, 6474 bp, Artificial Sequence
  derived and/or modified sequence
atgagcgacagaagcggccccaccgccaagggcaaggacggcaagaagtacagcagcctgaacctgttcgacacctacaagggcaagagcctggagatccagaagcccgccgtggcccccagacacggcctgcagagcctgggcaaggtggccatcgccagaagaatgcccccccccgccaacctgcccagcctgaaggccgagaacaagggcaacgaccccaacgtgagcctggtgcccaaggacggcaccggctgggccagcaagcaggagcagagcgaccccaagagcagcgacgccagcaccgcccagcccctggagagccagcccctgcccgccagccagacccccgccagcaaccagcccaagagaccccccgccgcccccgagaacacccccctggtgcccagcggcgtgaagagctgggcccaggccagcgtgacccacggcgcccacggcgacggcggcagagccagcagcctgctgagcagattcagcagagaggagttccccaccctgcaggccgccggcgaccaggacaaggccgccaaggagagagagagcgccgagcagagcagcggccccggccccagcctgagaccccagaacagcaccacctggagagacggcggcggcagaggccccgacgagctggagggccccgacagcaagctgcaccacggccacgaccccagaggcggcctgcagcccagcggccccccccagttccccccctacagaggcatgatgccccccttcatgtaccccccctacctgcccttcccccccccctacggcccccagggcccctacagataccccacccccgacggccccagcagattccccagagtggccggccccagaggcagcggcccccccatgagactggtggagcccgtgggcagacccagcatcctgaaggaggacaacctgaaggagttcgaccagctggaccaggagaacgacgacggctgggccggcgcccacgaggaggtggactacaccgagaagctgaagttcagcgacgaggaggacggcagagacagcgacgaggagggcgccgagggccacagagacagccagagcgccagcggcgaggagagaccccccgaggccgacggcaagaagggcaacagccccaacagcgagccccccacccccaagaccgcctgggccgagaccagcagaccccccgagaccgagcccggcccccccgcccccaagccccccctgccccccccccacagaggccccgccggcaactggggcccccccggcgactaccccgacagaggcggccccccctgcaagccccccgcccccgaggacgaggacgaggcctggagacagagaagaaagcagagcagcagcgagatcagcctggccgtggagagagccagaagaagaagagaggaggaggagagaagaatgcaggaggagagaagagccgcctgcgccgagaagctgaagagactggacgagaagttcggcgcccccgacaagagactgaaggccgagcccgccgccccccccgccgcccccagcacccccgcccccccccccgccgtgcccaaggagctgcccgccccccccgcccccccccccgccagcgcccccacccccgagaaggagcccgaggagcccgcccaggccccccccgcccagagcacccccacccccggcgtggccgccgcccccaccctggtgagcggcggcggcagcaccagcagcaccagcagcggcagcttcgaggccagccccgtggagccccagctgcccagcaaggagggccccgagccccccgaggaggtgcccccccccaccaccccccccgtgcccaaggtggagcccaagggcgacggcatcggccccaccagacagccccccagccagggcctgggctaccccaagtaccagaagagcctgccccccagattccagagacagcagcaggagcagctgctgaagcagcagcagcagcaccagtggcagcagcaccagcagggcagcgccccccccacccccgtgccccccagccccccccagcccgtgaccctgggcgccgtgcccgccccccaggcccccccccccccccccaaggccctgtaccccggcgccctgggcagacccccccccatgccccccatgaacttcgaccccagatggatgatgatccccccctacgtggaccccagactgctgcagggcagaccccccctggacttctacccccccggcgtgcaccccagcggcctggtgcccagagagagaagcgacagcggcggcagcagcagcgagcccttcgacagacacgcccccgccatgctgagagagagaggcaccccccccgtggaccccaagctggcctgggtgggcgacgtgttcaccgccacccccgccgagcccagacccctgaccagccccctgagacaggccgccgacgaggacgacaagggcatgagaagcgagaccccccccgtgccccccccccccccctacctggccagctaccccggcttccccgagaacggcgcccccggcccccccatcagcagattccccctggaggagcccggccccagacccctgccctggccccccggcagcgacgaggtggccaagatccagacccccccccccaagaaggagccccccaaggaggagaccgcccagctgaccggccccgaggccggcagaaagcccgccagaggcgtgggcagcggcggccagggcccccccccccccagaagagagagcagaaccgagaccagatggggccccagacccggcagcagcagaagaggcatcccccccgaggagcccggcgccccccccagaagagccggccccatcaagaagccccccccccccaccaaggtggaggagctgccccccaagcccctggagcagggcgacgagacccccaagccccccaagcccgaccccctgaagatcaccaagggcaagctgggcggccccaaggagaccccccccaacggcaacctgagccccgcccccagactgagaagagactacagctacgagagagtgggccccaccagctgcagaggcagaggcagaggcgagtacttcgccagaggcagaggcttcagaggcacctacggcggcagaggcagaggcgccagaagcagagagttcagaagctacagagagttcagaggcgacgacggcagaggcggcggcaccggcggccccaaccacccccccgcccccagaggcagaaccgccagcgagaccagaagcgagggcagcgagtacgaggagatccccaagagaagaagacagagaggcagcgagaccggcagcgagacccacgagagcgacctggcccccagcgacaaggaggcccccacccccaaggagggcaccctgacccaggtgcccctggccccccccccccccggcgccccccccagccccgcccccgccagattcaccgccagaggcggcagagtgttcacccccagaggcgtgcccagcagaagaggcagaggcggcggcagaccccccccccaggtgtgccccggctggagcccccccgccaagagcctggcccccaagaagccccccaccggccccctgccccccagcaaggagcccctgaaggagaagctgatccccggccccctgagccccgtggccagaggcggcagcaacggcggcagcaacgtgggcatggaggacggcgagagacccagaagaagaagacacggcagagcccagcagcaggacaagccccccagattcagaagactgaagcaggagagagagaacgccgccagaggcagcgagggcaagcccagcctgaccctgcccgccagcgcccccggccccgaggaggccctgaccaccgtgaccgtggcccccgcccccagaagagccgccgccaagagccccgacctgagcaaccagaacagcgaccaggccaacgaggagtgggagaccgccagcgagagcagcgacttcaccagcgagagaagaggcgacaaggaggcccccccccccgtgctgctgacccccaaggccgtgggcacccccggcggcggcggcggcggcgccgtgcccggcatcagcgccatgagcagaggcgacctgagccagagagccaaggacctgagcaagagaagcttcagcagccagagacccggcatggagagacagaacagaagacccggccccggcggcaaggccggcagcagcggcagcagcagcggcggcggcggcggcggccccggcggcagaaccggccccggcagaggcgacaagagaagctggcccagccccaagaacagaagcagaccccccgaggagagaccccccggcctgcccctgcccccccccccccccagcagcagcgccgtgttcagactggaccaggtgatccacagcaaccccgccggcatccagcaggccctggcccagctgagcagcagacagggcagcgtgaccgcccccggcggccaccccagacacaagcccggccccccccaggccccccagggccccagccccagaccccccaccagatacgagccccagagagtgaacagcggcctgagcagcgacccccacttcgaggagcccggccccatggtgagaggcgtgggcggcacccccagagacagcgccggcgtgagccccttcccccccaagagaagagagagaccccccagaaagcccgagctgctgcaggaggagagcctgccccccccccacagcagcggcttcctgggcagcaagcccgagggccccggcccccaggccgagagcagagacaccggcaccgaggccctgaccccccacatctggaacagactgcacaccgccaccagcagaaagagctacagacccagcagcatggagccctggatggagcccctgagccccttcgaggacgtggccggcaccgagatgagccagagcgacagcggcgtggacctgagcggcgacagccaggtgagcagcggcccctgcagccagagaagcagccccgacggcggcctgaagggcgccgccgagggcccccccaagagacccggcggcagcagccccctgaacgccgtgccctgcgagggcccccccggcagcgagccccccagaagacccccccccgccccccacgacggcgacagaaaggagctgcccagagagcagcccctgccccccggccccatcggcaccgagagaagccagagaaccgacagaggcaccgagcccggccccatcagacccagccacagacccggcccccccgtgcagttcggcaccagcgacaaggacagcgacctgagactggtggtgggcgacagcctgaaggccgagaaggagctgaccgccagcgtgaccgaggccatccccgtgagcagagactgggagctgctgcccagcgccgccgccagcgccgagccccagagcaagaacctggacagcggccactgcgtgcccgagcccagcagcagcggccagagactgtaccccgaggtgttctacggcagcgccggccccagcagcagccagatcagcggcggcgccatggacagccagctgcaccccaacagcggcggcttcagacccggcacccccagcctgcacccctacagaagccagcccctgtacctgccccccggccccgccccccccagcgccctgctgagcggcgtggccctgaagggccagttcctggacttcagcaccatgcaggccaccgagctgggcaagctgcccgccggcggcgtgctgtaccccccccccagcttcctgtacagccccgccttctgccccagccccctgcccgacaccagcctgctgcaggtgagacaggacctgcccagccccagcgacttctacagcacccccctgcagcccggcggccagagcggcttcctgcccagcggcgcccccgcccagcagatgctgctgcccatggtggacagccagctgcccgtggtgaacttcggcagcctgccccccgcccccccccccgcccccccccccctgagcctgctgcccgtgggccccgccctgcagccccccagcctggccgtgagacccccccccgcccccgccaccagagtgctgcccagccccgccagacccttccccgccagcctgggcagagccgagctgcaccccgtggagctgaagcccttccaggactaccagaagctgagcagcaacctgggcggccccggcagcagcagaaccccccccaccggcagaagcttcagcggcctgaacagcagactgaaggccacccccagcacctacagcggcgtgttcagaacccagagagtggacctgtaccagcaggccagcccccccgacgccctgagatggatccccaagccctgggagagaaccggccccccccccagagagggccccagcagaagagccgaggagcccggcagcagaggcgacaaggagcccggcctgcccccccccagatag

SEQ ID NO: 345162 - DNA, 6474 bp, Artificial Sequence
  derived and/or modified sequence
atgagcgacagaagcggccccaccgccaagggcaaggacggcaagaagtacagcagcctgaacctgttcgacacctacaagggcaagagcctggagatccagaagcccgccgtggcccccagacacggcctgcagagcctgggcaaggtggccatcgccagaagaatgcccccccccgccaacctgcccagcctgaaggccgagaacaagggcaacgaccccaacgtgagcctggtgcccaaggacggcaccggctgggccagcaagcaggagcagagcgaccccaagagcagcgacgccagcaccgcccagccccccgagagccagcccctgcccgccagccagacccccgccagcaaccagcccaagagaccccccgccgcccccgagaacacccccctggtgcccagcggcgtgaagagctgggcccaggccagcgtgacccacggcgcccacggcgacggcggcagagccagcagcctgctgagcagattcagcagagaggagttccccaccctgcaggccgccggcgaccaggacaaggccgccaaggagagagagagcgccgagcagagcagcggccccggccccagcctgagaccccagaacagcaccacctggagagacggcggcggcagaggccccgacgagctggagggccccgacagcaagctgcaccacggccacgaccccagaggcggcctgcagcccagcggccccccccagttccccccctacagaggcatgatgccccccttcatgtaccccccctacctgcccttcccccccccctacggcccccagggcccctacagataccccacccccgacggccccagcagattccccagagtggccggccccagaggcagcggcccccccatgagactggtggagcccgtgggcagacccagcatcctgaaggaggacaacctgaaggagttcgaccagctggaccaggagaacgacgacggctgggccggcgcccacgaggaggtggactacaccgagaagctgaagttcagcgacgaggaggacggcagagacagcgacgaggagggcgccgagggccacagagacagccagagcgccagcggcgaggagagaccccccgaggccgacggcaagaagggcaacagccccaacagcgagccccccacccccaagaccgcctgggccgagaccagcagaccccccgagaccgagcccggcccccccgcccccaagccccccctgccccccccccacagaggccccgccggcaactggggcccccccggcgactaccccgacagaggcggccccccctgcaagccccccgcccccgaggacgaggacgaggcctggagacagagaagaaagcagagcagcagcgagatcagcctggccgtggagagagccagaagaagaagagaggaggaggagagaagaatgcaggaggagagaagagccgcctgcgccgagaagctgaagagactggacgagaagttcggcgcccccgacaagagactgaaggccgagcccgccgccccccccgccgcccccagcacccccgcccccccccccgccgtgcccaaggagctgcccgccccccccgcccccccccccgccagcgcccccacccccgagaaggagcccgaggagcccgcccaggccccccccgcccagagcacccccacccccggcgtggccgccgcccccaccctggtgagcggcggcggcagcaccagcagcaccagcagcggcagcttcgaggccagccccgtggagccccagctgcccagcaaggagggccccgagccccccgaggaggtgcccccccccaccaccccccccgtgcccaaggtggagcccaagggcgacggcatcggccccaccagacagccccccagccagggcctgggctaccccaagtaccagaagagcctgccccccagattccagagacagcagcaggagcagctgctgaagcagcagcagcagcaccagtggcagcagcaccagcagggcagcgccccccccacccccgtgccccccagccccccccagcccgtgaccctgggcgccgtgcccgccccccaggcccccccccccccccccaaggccctgtaccccggcgccctgggcagacccccccccatgccccccatgaacttcgaccccagatggatgatgatccccccctacgtggaccccagactgctgcagggcagaccccccctggacttctacccccccggcgtgcaccccagcggcctggtgcccagagagagaagcgacagcggcggcagcagcagcgagcccttcgacagacacgcccccgccatgctgagagagagaggcaccccccccgtggaccccaagctggcctgggtgggcgacgtgttcaccgccacccccgccgagcccagacccctgaccagccccctgagacaggccgccgacgaggacgacaagggcatgagaagcgagaccccccccgtgccccccccccccccctacctggccagctaccccggcttccccgagaacggcgcccccggcccccccatcagcagattccccctggaggagcccggccccagacccctgccctggccccccggcagcgacgaggtggccaagatccagacccccccccccaagaaggagccccccaaggaggagaccgcccagctgaccggccccgaggccggcagaaagcccgccagaggcgtgggcagcggcggccagggcccccccccccccagaagagagagcagaaccgagaccagatggggccccagacccggcagcagcagaagaggcatcccccccgaggagcccggcgccccccccagaagagccggccccatcaagaagccccccccccccaccaaggtggaggagctgccccccaagcccctggagcagggcgacgagacccccaagccccccaagcccgaccccctgaagatcaccaagggcaagctgggcggccccaaggagaccccccccaacggcaacctgagccccgcccccagactgagaagagactacagctacgagagagtgggccccaccagctgcagaggcagaggcagaggcgagtacttcgccagaggcagaggcttcagaggcacctacggcggcagaggcagaggcgccagaagcagagagttcagaagctacagagagttcagaggcgacgacggcagaggcggcggcaccggcggccccaaccacccccccgcccccagaggcagaaccgccagcgagaccagaagcgagggcagcgagtacgaggagatccccaagagaagaagacagagaggcagcgagaccggcagcgagacccacgagagcgacctggcccccagcgacaaggaggcccccacccccaaggagggcaccctgacccaggtgcccctggccccccccccccccggcgccccccccagccccgcccccgccagattcaccgccagaggcggcagagtgttcacccccagaggcgtgcccagcagaagaggcagaggcggcggcagaccccccccccaggtgtgccccggctggagcccccccgccaagagcctggcccccaagaagccccccaccggccccctgccccccagcaaggagcccctgaaggagaagctgatccccggccccctgagccccgtggccagaggcggcagcaacggcggcagcaacgtgggcatggaggacggcgagagacccagaagaagaagacacggcagagcccagcagcaggacaagccccccagattcagaagactgaagcaggagagagagaacgccgccagaggcagcgagggcaagcccagcctgaccctgcccgccagcgcccccggccccgaggaggccctgaccaccgtgaccgtggcccccgcccccagaagagccgccgccaagagccccgacctgagcaaccagaacagcgaccaggccaacgaggagtgggagaccgccagcgagagcagcgacttcaccagcgagagaagaggcgacaaggaggcccccccccccgtgctgctgacccccaaggccgtgggcacccccggcggcggcggcggcggcgccgtgcccggcatcagcgccatgagcagaggcgacctgagccagagagccaaggacctgagcaagagaagcttcagcagccagagacccggcatggagagacagaacagaagacccggccccggcggcaaggccggcagcagcggcagcagcagcggcggcggcggcggcggccccggcggcagaaccggccccggcagaggcgacaagagaagctggcccagccccaagaacagaagcagaccccccgaggagagaccccccggcctgcccctgcccccccccccccccagcagcagcgccgtgttcagactggaccaggtgatccacagcaaccccgccggcatccagcaggccctggcccagctgagcagcagacagggcagcgtgaccgcccccggcggccaccccagacacaagcccggccccccccaggccccccagggccccagccccagaccccccaccagatacgagccccagagagtgaacagcggcctgagcagcgacccccacttcgaggagcccggccccatggtgagaggcgtgggcggcacccccagagacagcgccggcgtgagccccttcccccccaagagaagagagagaccccccagaaagcccgagctgctgcaggaggagagcctgccccccccccacagcagcggcttcctgggcagcaagcccgagggccccggcccccaggccgagagcagagacaccggcaccgaggccctgaccccccacatctggaacagactgcacaccgccaccagcagaaagagctacagacccagcagcatggagccctggatggagcccctgagccccttcgaggacgtggccggcaccgagatgagccagagcgacagcggcgtggacctgagcggcgacagccaggtgagcagcggcccctgcagccagagaagcagccccgacggcggcctgaagggcgccgccgagggcccccccaagagacccggcggcagcagccccctgaacgccgtgccctgcgagggcccccccggcagcgagccccccagaagacccccccccgccccccacgacggcgacagaaaggagctgcccagagagcagcccctgccccccggccccatcggcaccgagagaagccagagaaccgacagaggcaccgagcccggccccatcagacccagccacagacccggcccccccgtgcagttcggcaccagcgacaaggacagcgacctgagactggtggtgggcgacagcctgaaggccgagaaggagctgaccgccagcgtgaccgaggccatccccgtgagcagagactgggagctgctgcccagcgccgccgccagcgccgagccccagagcaagaacctggacagcggccactgcgtgcccgagcccagcagcagcggccagagactgtaccccgaggtgttctacggcagcgccggccccagcagcagccagatcagcggcggcgccatggacagccagctgcaccccaacagcggcggcttcagacccggcacccccagcctgcacccctacagaagccagcccctgtacctgccccccggccccgccccccccagcgccctgctgagcggcgtggccctgaagggccagttcctggacttcagcaccatgcaggccaccgagctgggcaagctgcccgccggcggcgtgctgtaccccccccccagcttcctgtacagccccgccttctgccccagccccctgcccgacaccagcctgctgcaggtgagacaggacctgcccagccccagcgacttctacagcacccccctgcagcccggcggccagagcggcttcctgcccagcggcgcccccgcccagcagatgctgctgcccatggtggacagccagctgcccgtggtgaacttcggcagcctgccccccgcccccccccccgcccccccccccctgagcctgctgcccgtgggccccgccctgcagccccccagcctggccgtgagacccccccccgcccccgccaccagagtgctgcccagccccgccagacccttccccgccagcctgggcagagccgagctgcaccccgtggagctgaagcccttccaggactaccagaagctgagcagcaacctgggcggccccggcagcagcagaaccccccccaccggcagaagcttcagcggcctgaacagcagactgaaggccacccccagcacctacagcggcgtgttcagaacccagagagtggacctgtaccagcaggccagcccccccgacgccctgagatggatccccaagccctgggagagaaccggccccccccccagagagggccccagcagaagagccgaggagcccggcagcagaggcgacaaggagcccggcctgcccccccccagatag

SEQ ID NO: 345163 - DNA, 6417 bp, Artificial Sequence
  derived and/or modified sequence
atgagcgacagaagcggccccaccgccaagggcaaggacggcaagaagtacagcagcctgaacctgttcgacacctacaagggcaagagcctggagatccagaagcccgccgtggcccccagacacggcctgcagagcctgggcaaggtggccatcgccagaagaatgcccccccccgccaacctgcccagcctgaaggccgagaacaagggcaacgaccccaacgtgagcctggtgcccaaggacggcaccggctgggccagcaagcaggagcagagcgaccccaagagcagcgacgccagcaccgcccagcccctggagagccagcccctgcccgccagccagacccccgccagcaaccagcccaagagaccccccgccgcccccgagaacacccccctggtgcccagcggcgtgaagagctgggcccaggccagcgtgacccacggcgcccacggcgacggcggcagagccagcagcctgctgagcagattcagcagagaggagttccccaccctgcaggccgccggcgaccaggacaaggccgccaaggagagagagagcgccgagcagagcagcggccccggccccagcctgagaccccagaacagcaccacctggagagacggcggcggcagaggccccgacgagctggagggccccgacagcaagctgcaccacggccacgaccccagaggcggcctgcagcccagcggccccccccagttccccccctacagaggcatgatgccccccttcatgtaccccccctacctgcccttcccccccccctacggcccccagggcccctacagataccccacccccgacggccccagcagattccccagagtggccggccccagaggcagcggcccccccatgagactggtggagcccgtgggcagacccagcatcctgaaggaggacaacctgaaggagttcgaccagctggaccaggagaacgacgacggctgggccggcgcccacgaggaggtggactacaccgagaagctgaagttcagcgacgaggaggacggcagagacagcgacgaggagggcgccgagggccacagagacagccagagcgccagcggcgaggagagaccccccgaggccgacggcaagaagggcaacagccccaacagcgagccccccacccccaagaccgcctgggccgagaccagcagaccccccgagaccgagcccggcccccccgcccccaagccccccctgcccccccccggcgactaccccgacagaggcggccccccctgcaagccccccgcccccgaggacgaggacgaggcctggagacagagaagaaagcagagcagcagcgagatcagcctggccgtggagagagccagaagaagaagagaggaggaggagagaagaatgcaggaggagagaagagccgcctgcgccgagaagctgaagagactggacgagaagttcggcgcccccgacaagagactgaaggccgagcccgccgccccccccgccgcccccagcacccccgcccccccccccgccgtgcccaaggagctgcccgccccccccgcccccccccccgccagcgcccccacccccgagaaggagcccgaggagcccgcccaggccccccccgcccagagcacccccacccccggcgtggccgccgcccccaccctggtgagcggcggcggcagcaccagcagcaccagcagcggcagcttcgaggccagccccgtggagccccagctgcccagcaaggagggccccgagccccccgaggaggtgcccccccccaccaccccccccgtgcccaaggtggagcccaagggcgacggcatcggccccaccagacagccccccagccagggcctgggctaccccaagtaccagaagagcctgccccccagattccagagacagcagcaggagcagctgctgaagcagcagcagcagcaccagtggcagcagcaccagcagggcagcgccccccccacccccgtgccccccagccccccccagcccgtgaccctgggcgccgtgcccgccccccaggcccccccccccccccccaaggccctgtaccccggcgccctgggcagacccccccccatgccccccatgaacttcgaccccagatggatgatgatccccccctacgtggaccccagactgctgcagggcagaccccccctggacttctacccccccggcgtgcaccccagcggcctggtgcccagagagagaagcgacagcggcggcagcagcagcgagcccttcgacagacacgcccccgccatgctgagagagagaggcaccccccccgtggaccccaagctggcctgggtgggcgacgtgttcaccgccacccccgccgagcccagacccctgaccagccccctgagacaggccgccgacgaggacgacaagggcatgagaagcgagaccccccccgtgccccccccccccccctacctggccagctaccccggcttccccgagaacggcgcccccggcccccccatcagcagattccccctggaggagcccggccccagacccctgccctggccccccggcagcgacgaggtggccaagatccagacccccccccccaagaaggagccccccaaggaggagaccgcccagctgaccggccccgaggccggcagaaagcccgccagaggcgtgggcagcggcggccagggcccccccccccccagaagagagagcagaaccgagaccagatggggccccagacccggcagcagcagaagaggcatcccccccgaggagcccggcgccccccccagaagagccggccccatcaagaagccccccccccccaccaaggtggaggagctgccccccaagcccctggagcagggcgacgagacccccaagccccccaagcccgaccccctgaagatcaccaagggcaagctgggcggccccaaggagaccccccccaacggcaacctgagccccgcccccagactgagaagagactacagctacgagagagtgggccccaccagctgcagaggcagaggcagaggcgagtacttcgccagaggcagaggcttcagaggcacctacggcggcagaggcagaggcgccgccggcaacagcgccgtgaccgagagcttcgaggagatgatgggcgtggaggtgggccagggcgaccagaccaccctgctgctgcccgaggccgccctgcccgccagacacggcgccagagtgcagagcatgagaaagagccccagcggcgccggcagcggcgcccagaagcaggccgccagacccatgagagtgatctggctgctgcagaccagaagactgccccaccccagaagagagcacagccccagaagcagaagccccaccaccagaagccccaccttccccgcccccgccagattcacccccggcgtgggcgagagcagcctgcccgagggcatcagccccggccccagaagaagagagcccccccaggtgtgccccggctggagcccccccgccaagagcctggcccccaagaagccccccaccggccccctgccccccagcaaggagcccctgaaggagaagctgatccccggccccctgagccccgtggccagaggcggcagcaacggcggcagcaacgtgggcatggaggacggcgagagacccagaagaagaagacacggcagagcccagcagcaggacaagccccccagattcagaagactgaagcaggagagagagaacgccgccagaggcagcgagggcaagcccagcctgaccctgcccgccagcgcccccggccccgaggaggccctgaccaccgtgaccgtggcccccgcccccagaagagccgccgccaagagccccgacctgagcaaccagaacagcgaccaggccaacgaggagtgggagaccgccagcgagagcagcgacttcaccagcgagagaagaggcgacaaggaggcccccccccccgtgctgctgacccccaaggccgtgggcacccccggcggcggcggcggcggcgccgtgcccggcatcagcgccatgagcagaggcgacctgagccagagagccaaggacctgagcaagagaagcttcagcagccagagacccggcatggagagacagaacagaagacccggccccggcggcaaggccggcagcagcggcagcagcagcggcggcggcggcggcggccccggcggcagaaccggccccggcagaggcgacaagagaagctggcccagccccaagaacagaagcagaccccccgaggagagaccccccggcctgcccctgcccccccccccccccagcagcagcgccgtgttcagactggaccaggtgatccacagcaaccccgccggcatccagcaggccctggcccagctgagcagcagacagggcagcgtgaccgcccccggcggccaccccagacacaagcccggccccccccaggccccccagggccccagccccagaccccccaccagatacgagccccagagagtgaacagcggcctgagcagcgacccccacttcgaggagcccggccccatggtgagaggcgtgggcggcacccccagagacagcgccggcgtgagccccttcccccccaagagaagagagagaccccccagaaagcccgagctgctgcaggaggagagcctgccccccccccacagcagcggcttcctgggcagcaagcccgagggccccggcccccaggccgagagcagagacaccggcaccgaggccctgaccccccacatctggaacagactgcacaccgccaccagcagaaagagctacagacccagcagcatggagccctggatggagcccctgagccccttcgaggacgtggccggcaccgagatgagccagagcgacagcggcgtggacctgagcggcgacagccaggtgagcagcggcccctgcagccagagaagcagccccgacggcggcctgaagggcgccgccgagggcccccccaagagacccggcggcagcagccccctgaacgccgtgccctgcgagggcccccccggcagcgagccccccagaagacccccccccgccccccacgacggcgacagaaaggagctgcccagagagcagcccctgccccccggccccatcggcaccgagagaagccagagaaccgacagaggcaccgagcccggccccatcagacccagccacagacccggcccccccgtgcagttcggcaccagcgacaaggacagcgacctgagactggtggtgggcgacagcctgaaggccgagaaggagctgaccgccagcgtgaccgaggccatccccgtgagcagagactgggagctgctgcccagcgccgccgccagcgccgagccccagagcaagaacctggacagcggccactgcgtgcccgagcccagcagcagcggccagagactgtaccccgaggtgttctacggcagcgccggccccagcagcagccagatcagcggcggccacggcctgagcatcaccagcaagcagtggagaagacccggcacccccagcctgcacccctacagaagccagcccctgtacctgccccccggccccgccccccccagcgccctgctgagcggcgtggccctgaagggccagttcctggacttcagcaccatgcaggccaccgagctgggcaagctgcccgccggcggcgtgctgtaccccccccccagcttcctgtacagccccgccttctgccccagccccctgcccgacaccagcctgctgcaggtgagacaggacctgcccagccccagcgacttctacagcacccccctgcagcccggcggccagagcggcttcctgcccagcggcgcccccgcccagcagatgctgctgcccatggtggacagccagctgcccgtggtgaacttcggcagcctgccccccgcccccccccccgcccccccccccctgagcctgctgcccgtgggccccgccctgcagccccccagcctggccgtgagacccccccccgcccccgccaccagagtgctgcccagccccgccagacccttccccgccagcctgggcagagccgagctgcaccccgtggagctgaagcccttccaggactaccagaagctgagcagcaacctgggcggccccggcagcagcagaaccccccccaccggcagaagcttcagcggcctgaacagcagactgaaggccacccccagcacctacagcggcgtgttcagaacccagagagtggacctgtaccagcaggccagcccccccgacgccctgagatggatccccaagccctgggagagaaccggccccccccccagagagggccccagcagaagagccgaggagcccggcagcagaggcgacaaggagcccggcctgcccccccccagatag

SEQ ID NO: 345164 - DNA, 6417 bp, Artificial Sequence
  derived and/or modified sequence
atgagcgacagaagcggccccaccgccaagggcaaggacggcaagaagtacagcagcctgaacctgttcgacacctacaagggcaagagcctggagatccagaagcccgccgtggcccccagacacggcctgcagagcctgggcaaggtggccatcgccagaagaatgcccccccccgccaacctgcccagcctgaaggccgagaacaagggcaacgaccccaacgtgagcctggtgcccaaggacggcaccggctgggccagcaagcaggagcagagcgaccccaagagcagcgacgccagcaccgcccagccccccgagagccagcccctgcccgccagccagacccccgccagcaaccagcccaagagaccccccgccgcccccgagaacacccccctggtgcccagcggcgtgaagagctgggcccaggccagcgtgacccacggcgcccacggcgacggcggcagagccagcagcctgctgagcagattcagcagagaggagttccccaccctgcaggccgccggcgaccaggacaaggccgccaaggagagagagagcgccgagcagagcagcggccccggccccagcctgagaccccagaacagcaccacctggagagacggcggcggcagaggccccgacgagctggagggccccgacagcaagctgcaccacggccacgaccccagaggcggcctgcagcccagcggccccccccagttccccccctacagaggcatgatgccccccttcatgtaccccccctacctgcccttcccccccccctacggcccccagggcccctacagataccccacccccgacggccccagcagattccccagagtggccggccccagaggcagcggcccccccatgagactggtggagcccgtgggcagacccagcatcctgaaggaggacaacctgaaggagttcgaccagctggaccaggagaacgacgacggctgggccggcgcccacgaggaggtggactacaccgagaagctgaagttcagcgacgaggaggacggcagagacagcgacgaggagggcgccgagggccacagagacagccagagcgccagcggcgaggagagaccccccgaggccgacggcaagaagggcaacagccccaacagcgagccccccacccccaagaccgcctgggccgagaccagcagaccccccgagaccgagcccggcccccccgcccccaagccccccctgcccccccccggcgactaccccgacagaggcggccccccctgcaagccccccgcccccgaggacgaggacgaggcctggagacagagaagaaagcagagcagcagcgagatcagcctggccgtggagagagccagaagaagaagagaggaggaggagagaagaatgcaggaggagagaagagccgcctgcgccgagaagctgaagagactggacgagaagttcggcgcccccgacaagagactgaaggccgagcccgccgccccccccgccgcccccagcacccccgcccccccccccgccgtgcccaaggagctgcccgccccccccgcccccccccccgccagcgcccccacccccgagaaggagcccgaggagcccgcccaggccccccccgcccagagcacccccacccccggcgtggccgccgcccccaccctggtgagcggcggcggcagcaccagcagcaccagcagcggcagcttcgaggccagccccgtggagccccagctgcccagcaaggagggccccgagccccccgaggaggtgcccccccccaccaccccccccgtgcccaaggtggagcccaagggcgacggcatcggccccaccagacagccccccagccagggcctgggctaccccaagtaccagaagagcctgccccccagattccagagacagcagcaggagcagctgctgaagcagcagcagcagcaccagtggcagcagcaccagcagggcagcgccccccccacccccgtgccccccagccccccccagcccgtgaccctgggcgccgtgcccgccccccaggcccccccccccccccccaaggccctgtaccccggcgccctgggcagacccccccccatgccccccatgaacttcgaccccagatggatgatgatccccccctacgtggaccccagactgctgcagggcagaccccccctggacttctacccccccggcgtgcaccccagcggcctggtgcccagagagagaagcgacagcggcggcagcagcagcgagcccttcgacagacacgcccccgccatgctgagagagagaggcaccccccccgtggaccccaagctggcctgggtgggcgacgtgttcaccgccacccccgccgagcccagacccctgaccagccccctgagacaggccgccgacgaggacgacaagggcatgagaagcgagaccccccccgtgccccccccccccccctacctggccagctaccccggcttccccgagaacggcgcccccggcccccccatcagcagattccccctggaggagcccggccccagacccctgccctggccccccggcagcgacgaggtggccaagatccagacccccccccccaagaaggagccccccaaggaggagaccgcccagctgaccggccccgaggccggcagaaagcccgccagaggcgtgggcagcggcggccagggcccccccccccccagaagagagagcagaaccgagaccagatggggccccagacccggcagcagcagaagaggcatcccccccgaggagcccggcgccccccccagaagagccggccccatcaagaagccccccccccccaccaaggtggaggagctgccccccaagcccctggagcagggcgacgagacccccaagccccccaagcccgaccccctgaagatcaccaagggcaagctgggcggccccaaggagaccccccccaacggcaacctgagccccgcccccagactgagaagagactacagctacgagagagtgggccccaccagctgcagaggcagaggcagaggcgagtacttcgccagaggcagaggcttcagaggcacctacggcggcagaggcagaggcgccgccggcaacagcgccgtgaccgagagcttcgaggagatgatgggcgtggaggtgggccagggcgaccagaccaccctgctgctgcccgaggccgccctgcccgccagacacggcgccagagtgcagagcatgagaaagagccccagcggcgccggcagcggcgcccagaagcaggccgccagacccatgagagtgatctggctgctgcagaccagaagactgccccaccccagaagagagcacagccccagaagcagaagccccaccaccagaagccccaccttccccgcccccgccagattcacccccggcgtgggcgagagcagcctgcccgagggcatcagccccggccccagaagaagagagcccccccaggtgtgccccggctggagcccccccgccaagagcctggcccccaagaagccccccaccggccccctgccccccagcaaggagcccctgaaggagaagctgatccccggccccctgagccccgtggccagaggcggcagcaacggcggcagcaacgtgggcatggaggacggcgagagacccagaagaagaagacacggcagagcccagcagcaggacaagccccccagattcagaagactgaagcaggagagagagaacgccgccagaggcagcgagggcaagcccagcctgaccctgcccgccagcgcccccggccccgaggaggccctgaccaccgtgaccgtggcccccgcccccagaagagccgccgccaagagccccgacctgagcaaccagaacagcgaccaggccaacgaggagtgggagaccgccagcgagagcagcgacttcaccagcgagagaagaggcgacaaggaggcccccccccccgtgctgctgacccccaaggccgtgggcacccccggcggcggcggcggcggcgccgtgcccggcatcagcgccatgagcagaggcgacctgagccagagagccaaggacctgagcaagagaagcttcagcagccagagacccggcatggagagacagaacagaagacccggccccggcggcaaggccggcagcagcggcagcagcagcggcggcggcggcggcggccccggcggcagaaccggccccggcagaggcgacaagagaagctggcccagccccaagaacagaagcagaccccccgaggagagaccccccggcctgcccctgcccccccccccccccagcagcagcgccgtgttcagactggaccaggtgatccacagcaaccccgccggcatccagcaggccctggcccagctgagcagcagacagggcagcgtgaccgcccccggcggccaccccagacacaagcccggccccccccaggccccccagggccccagccccagaccccccaccagatacgagccccagagagtgaacagcggcctgagcagcgacccccacttcgaggagcccggccccatggtgagaggcgtgggcggcacccccagagacagcgccggcgtgagccccttcccccccaagagaagagagagaccccccagaaagcccgagctgctgcaggaggagagcctgccccccccccacagcagcggcttcctgggcagcaagcccgagggccccggcccccaggccgagagcagagacaccggcaccgaggccctgaccccccacatctggaacagactgcacaccgccaccagcagaaagagctacagacccagcagcatggagccctggatggagcccctgagccccttcgaggacgtggccggcaccgagatgagccagagcgacagcggcgtggacctgagcggcgacagccaggtgagcagcggcccctgcagccagagaagcagccccgacggcggcctgaagggcgccgccgagggcccccccaagagacccggcggcagcagccccctgaacgccgtgccctgcgagggcccccccggcagcgagccccccagaagacccccccccgccccccacgacggcgacagaaaggagctgcccagagagcagcccctgccccccggccccatcggcaccgagagaagccagagaaccgacagaggcaccgagcccggccccatcagacccagccacagacccggcccccccgtgcagttcggcaccagcgacaaggacagcgacctgagactggtggtgggcgacagcctgaaggccgagaaggagctgaccgccagcgtgaccgaggccatccccgtgagcagagactgggagctgctgcccagcgccgccgccagcgccgagccccagagcaagaacctggacagcggccactgcgtgcccgagcccagcagcagcggccagagactgtaccccgaggtgttctacggcagcgccggccccagcagcagccagatcagcggcggccacggcctgagcatcaccagcaagcagtggagaagacccggcacccccagcctgcacccctacagaagccagcccctgtacctgccccccggccccgccccccccagcgccctgctgagcggcgtggccctgaagggccagttcctggacttcagcaccatgcaggccaccgagctgggcaagctgcccgccggcggcgtgctgtaccccccccccagcttcctgtacagccccgccttctgccccagccccctgcccgacaccagcctgctgcaggtgagacaggacctgcccagccccagcgacttctacagcacccccctgcagcccggcggccagagcggcttcctgcccagcggcgcccccgcccagcagatgctgctgcccatggtggacagccagctgcccgtggtgaacttcggcagcctgccccccgcccccccccccgcccccccccccctgagcctgctgcccgtgggccccgccctgcagccccccagcctggccgtgagacccccccccgcccccgccaccagagtgctgcccagccccgccagacccttccccgccagcctgggcagagccgagctgcaccccgtggagctgaagcccttccaggactaccagaagctgagcagcaacctgggcggccccggcagcagcagaaccccccccaccggcagaagcttcagcggcctgaacagcagactgaaggccacccccagcacctacagcggcgtgttcagaacccagagagtggacctgtaccagcaggccagcccccccgacgccctgagatggatccccaagccctgggagagaaccggccccccccccagagagggccccagcagaagagccgaggagcccggcagcagaggcgacaaggagcccggcctgcccccccccagatag

SEQ ID NO: 345165 - DNA, 6450 bp, Artificial Sequence
  derived and/or modified sequence
atgagcgacagaagcggccccaccgccaagggcaaggacggcaagaagtacagcagcctgaacctgttcgacacctacaagggcaagagcctggagatccagaagcccgccgtggcccccagacacggcctgcagagcctgggcaaggtggccatcgccagaagaatgcccccccccgccaacctgcccagcctgaaggccgagaacaagggcaacgaccccaacgtgagcctggtgcccaaggacggcaccggctgggccagcaagcaggagcagagcgaccccaagagcagcgacgccagcaccgcccagccccccgagagccagcccctgcccgccagccagacccccgccagcaaccagcccaagagaccccccgccgcccccgagaacacccccctggtgcccagcggcgtgaagagctgggcccaggccagcgtgacccacggcgcccacggcgacggcggcagagccagcagcctgctgagcagattcagcagagaggagttccccaccctgcaggccgccggcgaccaggacaaggccgccaaggagagagagagcgccgagcagagcagcggccccggccccagcctgagaccccagaacagcaccacctggagagacggcggcggcagaggccccgacgagctggagggccccgacagcaagctgcaccacggccacgaccccagaggcggcctgcagcccagcggccccccccagttccccccctacagaggcatgatgccccccttcatgtaccccccctacctgcccttcccccccccctacggcccccagggcccctacagataccccacccccgacggccccagcagattccccagagtggccggccccagaggcagcggcccccccatgagactggtggagcccgtgggcagacccagcatcctgaaggaggacaacctgaaggagttcgaccagctggaccaggagaacgacgacggctgggccggcgcccacgaggaggtggactacaccgagaagctgaagttcagcgacgaggaggacggcagagacagcgacgaggagggcgccgagggccacagagacagccagagcgccagcggcgaggagagaccccccgaggccgacggcaagaagggcaacagccccaacagcgagccccccacccccaagaccgcctgggccgagaccagcagaccccccgagaccgagcccggcccccccgcccccaagccccccctgccccccccccacagaggccccgccggcaactggggcccccccggcgactaccccgacagaggcggccccccctgcaagccccccgcccccgaggacgaggacgaggcctggagacagagaagaaagcagagcagcagcgagatcagcctggccgtggagagagccagaagaagaagagaggaggaggagagaagaatgcaggaggagagaagagccgcctgcgccgagaagctgaagagactggacgagaagttcggcgcccccgacaagagactgaaggccgagcccgccgccccccccgccgcccccagcacccccgcccccccccccgccgtgcccaaggagctgcccgccccccccgcccccccccccgccagcgcccccacccccgagaaggagcccgaggagcccgcccaggccccccccgcccagagcacccccacccccggcgtggccgccgcccccaccctggtgagcggcggcggcagcaccagcagcaccagcagcggcagcttcgaggccagccccgtggagccccagctgcccagcaaggagggccccgagccccccgaggaggtgcccccccccaccaccccccccgtgcccaaggtggagcccaagggcgacggcatcggccccaccagacagccccccagccagggcctgggctaccccaagtaccagaagagcctgccccccagattccagagacagcagcaggagcagctgctgaagcagcagcagcagcaccagtggcagcagcaccagcagggcagcgccccccccacccccgtgccccccagccccccccagcccgtgaccctgggcgccgtgcccgccccccaggcccccccccccccccccaaggccctgtaccccggcgccctgggcagacccccccccatgccccccatgaacttcgaccccagatggatgatgatccccccctacgtggaccccagactgctgcagggcagaccccccctggacttctacccccccggcgtgcaccccagcggcctggtgcccagagagagaagcgacagcggcggcagcagcagcgagcccttcgacagacacgcccccgccatgctgagagagagaggcaccccccccgtggaccccaagctggcctgggtgggcgacgtgttcaccgccacccccgccgagcccagacccctgaccagccccctgagacaggccgccgacgaggacgacaagggcatgagaagcgagaccccccccgtgccccccccccccccctacctggccagctaccccggcttccccgagaacggcgcccccggcccccccatcagcagattccccctggaggagcccggccccagacccctgccctggccccccggcagcgacgaggtggccaagatccagacccccccccccaagaaggagccccccaaggaggagaccgcccagctgaccggccccgaggccggcagaaagcccgccagaggcgtgggcagcggcggccagggcccccccccccccagaagagagagcagaaccgagaccagatggggccccagacccggcagcagcagaagaggcatcccccccgaggagcccggcgccccccccagaagagccggccccatcaagaagccccccccccccaccaaggtggaggagctgccccccaagcccctggagcagggcgacgagacccccaagccccccaagcccgaccccctgaagatcaccaagggcaagctgggcggccccaaggagaccccccccaacggcaacctgagccccgcccccagactgagaagagactacagctacgagagagtgggccccaccagctgcagaggcagaggcagaggcgagtacttcgccagaggcagaggcttcagaggcacctacggcggcagaggcagaggcgccgccggcaacagcgccgtgaccgagagcttcgaggagatgatgggcgtggaggtgggccagggcgaccagaccaccctgctgctgcccgaggccgccctgcccgccagacacggcgccagagtgcagagcatgagaaagagccccagcggcgccggcagcggcgcccagaagcaggccgccagacccatgagagtgatctggctgctgcagaccagaagactgccccaccccagaagagagcacagccccagaagcagaagccccaccaccagaagccccaccttccccgcccccgccagattcacccccggcgtgggcgagagcagcctgcccgagggcatcagccccggccccagaagaagagagcccccccaggtgtgccccggctggagcccccccgccaagagcctggcccccaagaagccccccaccggccccctgccccccagcaaggagcccctgaaggagaagctgatccccggccccctgagccccgtggccagaggcggcagcaacggcggcagcaacgtgggcatggaggacggcgagagacccagaagaagaagacacggcagagcccagcagcaggacaagccccccagattcagaagactgaagcaggagagagagaacgccgccagaggcagcgagggcaagcccagcctgaccctgcccgccagcgcccccggccccgaggaggccctgaccaccgtgaccgtggcccccgcccccagaagagccgccgccaagagccccgacctgagcaaccagaacagcgaccaggccaacgaggagtgggagaccgccagcgagagcagcgacttcaccagcgagagaagaggcgacaaggaggcccccccccccgtgctgctgacccccaaggccgtgggcacccccggcggcggcggcggcggcgccgtgcccggcatcagcgccatgagcagaggcgacctgagccagagagccaaggacctgagcaagagaagcttcagcagccagagacccggcatggagagacagaacagaagacccggccccggcggcaaggccggcagcagcggcagcagcagcggcggcggcggcggcggccccggcggcagaaccggccccggcagaggcgacaagagaagctggcccagccccaagaacagaagcagaccccccgaggagagaccccccggcctgcccctgcccccccccccccccagcagcagcgccgtgttcagactggaccaggtgatccacagcaaccccgccggcatccagcaggccctggcccagctgagcagcagacagggcagcgtgaccgcccccggcggccaccccagacacaagcccggccccccccaggccccccagggccccagccccagaccccccaccagatacgagccccagagagtgaacagcggcctgagcagcgacccccacttcgaggagcccggccccatggtgagaggcgtgggcggcacccccagagacagcgccggcgtgagccccttcccccccaagagaagagagagaccccccagaaagcccgagctgctgcaggaggagagcctgccccccccccacagcagcggcttcctgggcagcaagcccgagggccccggcccccaggccgagagcagagacaccggcaccgaggccctgaccccccacatctggaacagactgcacaccgccaccagcagaaagagctacagacccagcagcatggagccctggatggagcccctgagccccttcgaggacgtggccggcaccgagatgagccagagcgacagcggcgtggacctgagcggcgacagccaggtgagcagcggcccctgcagccagagaagcagccccgacggcggcctgaagggcgccgccgagggcccccccaagagacccggcggcagcagccccctgaacgccgtgccctgcgagggcccccccggcagcgagccccccagaagacccccccccgccccccacgacggcgacagaaaggagctgcccagagagcagcccctgccccccggccccatcggcaccgagagaagccagagaaccgacagaggcaccgagcccggccccatcagacccagccacagacccggcccccccgtgcagttcggcaccagcgacaaggacagcgacctgagactggtggtgggcgacagcctgaaggccgagaaggagctgaccgccagcgtgaccgaggccatccccgtgagcagagactgggagctgctgcccagcgccgccgccagcgccgagccccagagcaagaacctggacagcggccactgcgtgcccgagcccagcagcagcggccagagactgtaccccgaggtgttctacggcagcgccggccccagcagcagccagatcagcggcggccacggcctgagcatcaccagcaagcagtggagaagacccggcacccccagcctgcacccctacagaagccagcccctgtacctgccccccggccccgccccccccagcgccctgctgagcggcgtggccctgaagggccagttcctggacttcagcaccatgcaggccaccgagctgggcaagctgcccgccggcggcgtgctgtaccccccccccagcttcctgtacagccccgccttctgccccagccccctgcccgacaccagcctgctgcaggtgagacaggacctgcccagccccagcgacttctacagcacccccctgcagcccggcggccagagcggcttcctgcccagcggcgcccccgcccagcagatgctgctgcccatggtggacagccagctgcccgtggtgaacttcggcagcctgccccccgcccccccccccgcccccccccccctgagcctgctgcccgtgggccccgccctgcagccccccagcctggccgtgagacccccccccgcccccgccaccagagtgctgcccagccccgccagacccttccccgccagcctgggcagagccgagctgcaccccgtggagctgaagcccttccaggactaccagaagctgagcagcaacctgggcggccccggcagcagcagaaccccccccaccggcagaagcttcagcggcctgaacagcagactgaaggccacccccagcacctacagcggcgtgttcagaacccagagagtggacctgtaccagcaggccagcccccccgacgccctgagatggatccccaagccctgggagagaaccggccccccccccagagagggccccagcagaagagccgaggagcccggcagcagaggcgacaaggagcccggcctgcccccccccagatag

SEQ ID NO: 345166 - DNA, 6450 bp, Artificial Sequence
  derived and/or modified sequence
atgagcgacagaagcggccccaccgccaagggcaaggacggcaagaagtacagcagcctgaacctgttcgacacctacaagggcaagagcctggagatccagaagcccgccgtggcccccagacacggcctgcagagcctgggcaaggtggccatcgccagaagaatgcccccccccgccaacctgcccagcctgaaggccgagaacaagggcaacgaccccaacgtgagcctggtgcccaaggacggcaccggctgggccagcaagcaggagcagagcgaccccaagagcagcgacgccagcaccgcccagcccctggagagccagcccctgcccgccagccagacccccgccagcaaccagcccaagagaccccccgccgcccccgagaacacccccctggtgcccagcggcgtgaagagctgggcccaggccagcgtgacccacggcgcccacggcgacggcggcagagccagcagcctgctgagcagattcagcagagaggagttccccaccctgcaggccgccggcgaccaggacaaggccgccaaggagagagagagcgccgagcagagcagcggccccggccccagcctgagaccccagaacagcaccacctggagagacggcggcggcagaggccccgacgagctggagggccccgacagcaagctgcaccacggccacgaccccagaggcggcctgcagcccagcggccccccccagttccccccctacagaggcatgatgccccccttcatgtaccccccctacctgcccttcccccccccctacggcccccagggcccctacagataccccacccccgacggccccagcagattccccagagtggccggccccagaggcagcggcccccccatgagactggtggagcccgtgggcagacccagcatcctgaaggaggacaacctgaaggagttcgaccagctggaccaggagaacgacgacggctgggccggcgcccacgaggaggtggactacaccgagaagctgaagttcagcgacgaggaggacggcagagacagcgacgaggagggcgccgagggccacagagacagccagagcgccagcggcgaggagagaccccccgaggccgacggcaagaagggcaacagccccaacagcgagccccccacccccaagaccgcctgggccgagaccagcagaccccccgagaccgagcccggcccccccgcccccaagccccccctgccccccccccacagaggccccgccggcaactggggcccccccggcgactaccccgacagaggcggccccccctgcaagccccccgcccccgaggacgaggacgaggcctggagacagagaagaaagcagagcagcagcgagatcagcctggccgtggagagagccagaagaagaagagaggaggaggagagaagaatgcaggaggagagaagagccgcctgcgccgagaagctgaagagactggacgagaagttcggcgcccccgacaagagactgaaggccgagcccgccgccccccccgccgcccccagcacccccgcccccccccccgccgtgcccaaggagctgcccgccccccccgcccccccccccgccagcgcccccacccccgagaaggagcccgaggagcccgcccaggccccccccgcccagagcacccccacccccggcgtggccgccgcccccaccctggtgagcggcggcggcagcaccagcagcaccagcagcggcagcttcgaggccagccccgtggagccccagctgcccagcaaggagggccccgagccccccgaggaggtgcccccccccaccaccccccccgtgcccaaggtggagcccaagggcgacggcatcggccccaccagacagccccccagccagggcctgggctaccccaagtaccagaagagcctgccccccagattccagagacagcagcaggagcagctgctgaagcagcagcagcagcaccagtggcagcagcaccagcagggcagcgccccccccacccccgtgccccccagccccccccagcccgtgaccctgggcgccgtgcccgccccccaggcccccccccccccccccaaggccctgtaccccggcgccctgggcagacccccccccatgccccccatgaacttcgaccccagatggatgatgatccccccctacgtggaccccagactgctgcagggcagaccccccctggacttctacccccccggcgtgcaccccagcggcctggtgcccagagagagaagcgacagcggcggcagcagcagcgagcccttcgacagacacgcccccgccatgctgagagagagaggcaccccccccgtggaccccaagctggcctgggtgggcgacgtgttcaccgccacccccgccgagcccagacccctgaccagccccctgagacaggccgccgacgaggacgacaagggcatgagaagcgagaccccccccgtgccccccccccccccctacctggccagctaccccggcttccccgagaacggcgcccccggcccccccatcagcagattccccctggaggagcccggccccagacccctgccctggccccccggcagcgacgaggtggccaagatccagacccccccccccaagaaggagccccccaaggaggagaccgcccagctgaccggccccgaggccggcagaaagcccgccagaggcgtgggcagcggcggccagggcccccccccccccagaagagagagcagaaccgagaccagatggggccccagacccggcagcagcagaagaggcatcccccccgaggagcccggcgccccccccagaagagccggccccatcaagaagccccccccccccaccaaggtggaggagctgccccccaagcccctggagcagggcgacgagacccccaagccccccaagcccgaccccctgaagatcaccaagggcaagctgggcggccccaaggagaccccccccaacggcaacctgagccccgcccccagactgagaagagactacagctacgagagagtgggccccaccagctgcagaggcagaggcagaggcgagtacttcgccagaggcagaggcttcagaggcacctacggcggcagaggcagaggcgccgccggcaacagcgccgtgaccgagagcttcgaggagatgatgggcgtggaggtgggccagggcgaccagaccaccctgctgctgcccgaggccgccctgcccgccagacacggcgccagagtgcagagcatgagaaagagccccagcggcgccggcagcggcgcccagaagcaggccgccagacccatgagagtgatctggctgctgcagaccagaagactgccccaccccagaagagagcacagccccagaagcagaagccccaccaccagaagccccaccttccccgcccccgccagattcacccccggcgtgggcgagagcagcctgcccgagggcatcagccccggccccagaagaagagagcccccccaggtgtgccccggctggagcccccccgccaagagcctggcccccaagaagccccccaccggccccctgccccccagcaaggagcccctgaaggagaagctgatccccggccccctgagccccgtggccagaggcggcagcaacggcggcagcaacgtgggcatggaggacggcgagagacccagaagaagaagacacggcagagcccagcagcaggacaagccccccagattcagaagactgaagcaggagagagagaacgccgccagaggcagcgagggcaagcccagcctgaccctgcccgccagcgcccccggccccgaggaggccctgaccaccgtgaccgtggcccccgcccccagaagagccgccgccaagagccccgacctgagcaaccagaacagcgaccaggccaacgaggagtgggagaccgccagcgagagcagcgacttcaccagcgagagaagaggcgacaaggaggcccccccccccgtgctgctgacccccaaggccgtgggcacccccggcggcggcggcggcggcgccgtgcccggcatcagcgccatgagcagaggcgacctgagccagagagccaaggacctgagcaagagaagcttcagcagccagagacccggcatggagagacagaacagaagacccggccccggcggcaaggccggcagcagcggcagcagcagcggcggcggcggcggcggccccggcggcagaaccggccccggcagaggcgacaagagaagctggcccagccccaagaacagaagcagaccccccgaggagagaccccccggcctgcccctgcccccccccccccccagcagcagcgccgtgttcagactggaccaggtgatccacagcaaccccgccggcatccagcaggccctggcccagctgagcagcagacagggcagcgtgaccgcccccggcggccaccccagacacaagcccggccccccccaggccccccagggccccagccccagaccccccaccagatacgagccccagagagtgaacagcggcctgagcagcgacccccacttcgaggagcccggccccatggtgagaggcgtgggcggcacccccagagacagcgccggcgtgagccccttcccccccaagagaagagagagaccccccagaaagcccgagctgctgcaggaggagagcctgccccccccccacagcagcggcttcctgggcagcaagcccgagggccccggcccccaggccgagagcagagacaccggcaccgaggccctgaccccccacatctggaacagactgcacaccgccaccagcagaaagagctacagacccagcagcatggagccctggatggagcccctgagccccttcgaggacgtggccggcaccgagatgagccagagcgacagcggcgtggacctgagcggcgacagccaggtgagcagcggcccctgcagccagagaagcagccccgacggcggcctgaagggcgccgccgagggcccccccaagagacccggcggcagcagccccctgaacgccgtgccctgcgagggcccccccggcagcgagccccccagaagacccccccccgccccccacgacggcgacagaaaggagctgcccagagagcagcccctgccccccggccccatcggcaccgagagaagccagagaaccgacagaggcaccgagcccggccccatcagacccagccacagacccggcccccccgtgcagttcggcaccagcgacaaggacagcgacctgagactggtggtgggcgacagcctgaaggccgagaaggagctgaccgccagcgtgaccgaggccatccccgtgagcagagactgggagctgctgcccagcgccgccgccagcgccgagccccagagcaagaacctggacagcggccactgcgtgcccgagcccagcagcagcggccagagactgtaccccgaggtgttctacggcagcgccggccccagcagcagccagatcagcggcggccacggcctgagcatcaccagcaagcagtggagaagacccggcacccccagcctgcacccctacagaagccagcccctgtacctgccccccggccccgccccccccagcgccctgctgagcggcgtggccctgaagggccagttcctggacttcagcaccatgcaggccaccgagctgggcaagctgcccgccggcggcgtgctgtaccccccccccagcttcctgtacagccccgccttctgccccagccccctgcccgacaccagcctgctgcaggtgagacaggacctgcccagccccagcgacttctacagcacccccctgcagcccggcggccagagcggcttcctgcccagcggcgcccccgcccagcagatgctgctgcccatggtggacagccagctgcccgtggtgaacttcggcagcctgccccccgcccccccccccgcccccccccccctgagcctgctgcccgtgggccccgccctgcagccccccagcctggccgtgagacccccccccgcccccgccaccagagtgctgcccagccccgccagacccttccccgccagcctgggcagagccgagctgcaccccgtggagctgaagcccttccaggactaccagaagctgagcagcaacctgggcggccccggcagcagcagaaccccccccaccggcagaagcttcagcggcctgaacagcagactgaaggccacccccagcacctacagcggcgtgttcagaacccagagagtggacctgtaccagcaggccagcccccccgacgccctgagatggatccccaagccctgggagagaaccggccccccccccagagagggccccagcagaagagccgaggagcccggcagcagaggcgacaaggagcccggcctgcccccccccagatag

SEQ ID NO: 345167 - DNA, 4149 bp, Artificial Sequence
  derived and/or modified sequence
atgctgagagagagaggcaccccccccgtggaccccaagctggcctgggtgggcgacgtgttcaccgccacccccgccgagcccagacccctgaccagccccctgagacaggccgccgacgaggacgacaagggcatgagaagcgagaccccccccgtgccccccccccccccctacctggccagctaccccggcttccccgagaacggcgcccccggcccccccatcagcagattccccctggaggagcccggccccagacccctgccctggccccccggcagcgacgaggtggccaagatccagacccccccccccaagaaggagccccccaaggaggagaccgcccagctgaccggccccgaggccggcagaaagcccgccagaggcgtgggcagcggcggccagggcccccccccccccagaagagagagcagaaccgagaccagatggggccccagacccggcagcagcagaagaggcatcccccccgaggagcccggcgccccccccagaagagccggccccatcaagaagccccccccccccaccaaggtggaggagctgccccccaagcccctggagcagggcgacgagacccccaagccccccaagcccgaccccctgaagatcaccaagggcaagctgggcggccccaaggagaccccccccaacggcaacctgagccccgcccccagactgagaagagactacagctacgagagagtgggccccaccagctgcagaggcagaggcagaggcgagtacttcgccagaggcagaggcttcagaggcacctacggcggcagaggcagaggcgccagaagcagagagttcagaagctacagagagttcagaggcgacgacggcagaggcggcggcaccggcggccccaaccacccccccgcccccagaggcagaaccgccagcgagaccagaagcgagggcagcgagtacgaggagatccccaagagaagaagacagagaggcagcgagaccggcagcgagacccacgagagcgacctggcccccagcgacaaggaggcccccacccccaaggagggcaccctgacccaggtgcccctggccccccccccccccggcgccccccccagccccgcccccgccagattcaccgccagaggcggcagagtgttcacccccagaggcgtgcccagcagaagaggcagaggcggcggcagaccccccccccaggtgtgccccggctggagcccccccgccaagagcctggcccccaagaagccccccaccggccccctgccccccagcaaggagcccctgaaggagaagctgatccccggccccctgagccccgtggccagaggcggcagcaacggcggcagcaacgtgggcatggaggacggcgagagacccagaagaagaagacacggcagagcccagcagcaggacaagccccccagattcagaagactgaagcaggagagagagaacgccgccagaggcagcgagggcaagcccagcctgaccctgcccgccagcgcccccggccccgaggaggccctgaccaccgtgaccgtggcccccgcccccagaagagccgccgccaagagccccgacctgagcaaccagaacagcgaccaggccaacgaggagtgggagaccgccagcgagagcagcgacttcaccagcgagagaagaggcgacaaggaggcccccccccccgtgctgctgacccccaaggccgtgggcacccccggcggcggcggcggcggcgccgtgcccggcatcagcgccatgagcagaggcgacctgagccagagagccaaggacctgagcaagagaagcttcagcagccagagacccggcatggagagacagaacagaagacccggccccggcggcaaggccggcagcagcggcagcagcagcggcggcggcggcggcggccccggcggcagaaccggccccggcagaggcgacaagagaagctggcccagccccaagaacagaagcagaccccccgaggagagaccccccggcctgcccctgcccccccccccccccagcagcagcgccgtgttcagactggaccaggtgatccacagcaaccccgccggcatccagcaggccctggcccagctgagcagcagacagggcagcgtgaccgcccccggcggccaccccagacacaagcccggccccccccaggccccccagggccccagccccagaccccccaccagatacgagccccagagagtgaacagcggcctgagcagcgacccccacttcgaggagcccggccccatggtgagaggcgtgggcggcacccccagagacagcgccggcgtgagccccttcccccccaagagaagagagagaccccccagaaagcccgagctgctgcaggaggagagcctgccccccccccacagcagcggcttcctgggcagcaagcccgagggccccggcccccaggccgagagcagagacaccggcaccgaggccctgaccccccacatctggaacagactgcacaccgccaccagcagaaagagctacagacccagcagcatggagccctggatggagcccctgagccccttcgaggacgtggccggcaccgagatgagccagagcgacagcggcgtggacctgagcggcgacagccaggtgagcagcggcccctgcagccagagaagcagccccgacggcggcctgaagggcgccgccgagggcccccccaagagacccggcggcagcagccccctgaacgccgtgccctgcgagggcccccccggcagcgagccccccagaagacccccccccgccccccacgacggcgacagaaaggagctgcccagagagcagcccctgccccccggccccatcggcaccgagagaagccagagaaccgacagaggcaccgagcccggccccatcagacccagccacagacccggcccccccgtgcagttcggcaccagcgacaaggacagcgacctgagactggtggtgggcgacagcctgaaggccgagaaggagctgaccgccagcgtgaccgaggccatccccgtgagcagagactgggagctgctgcccagcgccgccgccagcgccgagccccagagcaagaacctggacagcggccactgcgtgcccgagcccagcagcagcggccagagactgtaccccgaggtgttctacggcagcgccggccccagcagcagccagatcagcggcggcgccatggacagccagctgcaccccaacagcggcggcttcagacccggcacccccagcctgcacccctacagaagccagcccctgtacctgccccccggccccgccccccccagcgccctgctgagcggcgtggccctgaagggccagttcctggacttcagcaccatgcaggccaccgagctgggcaagctgcccgccggcggcgtgctgtaccccccccccagcttcctgtacagccccgccttctgccccagccccctgcccgacaccagcctgctgcaggtgagacaggacctgcccagccccagcgacttctacagcacccccctgcagcccggcggccagagcggcttcctgcccagcggcgcccccgcccagcagatgctgctgcccatggtggacagccagctgcccgtggtgaacttcggcagcctgccccccgcccccccccccgcccccccccccctgagcctgctgcccgtgggccccgccctgcagccccccagcctggccgtgagacccccccccgcccccgccaccagagtgctgcccagccccgccagacccttccccgccagcctgggcagagccgagctgcaccccgtggagctgaagcccttccaggactaccagaagctgagcagcaacctgggcggccccggcagcagcagaaccccccccaccggcagaagcttcagcggcctgaacagcagactgaaggccacccccagcacctacagcggcgtgttcagaacccagagagtggacctgtaccagcaggccagcccccccgacgccctgagatggatccccaagccctgggagagaaccggccccccccccagagagggccccagcagaagagccgaggagcccggcagcagaggcgacaaggagcccggcctgcccccccccagatag

SEQ ID NO: 345168 - protein, 259 aa, Artificial Sequence
  derived and/or modified sequence
MEPNDSTSTAVEEPDSLEVLVKTLDSQTRTFIVGAQMNVKEFKEHIAASVSIPSEKQRLIYQGRVLQDDKKLQEYNVGGKVIHLVERAPPQTHLPSGASSGTGSASATHGGGSPPGTRGPGASVHDRNANSYVMVGTFNLPSDGSAVDVHINMEQAPIQSEPRVRLVMAQHMIRDIQTLLSRMECRGGPQPQHSQPPPQPPAVTPEPVALSSQTSEPVESEAPPREPMEAEEVEERAPAQNPELTPGPAPAGPTPAPET

SEQ ID NO: 345169 - protein, 1077 aa, Artificial Sequence
  derived and/or modified sequence
MEPNDSTSTAVEEPDSLEVLVKTLDSQTRTFIVGAQMNVKEFKEHIAASVSIPSEKQRLIYQGRVLQDDKKLQEYNVGGKVIHLVERAPPQTHLPSGASSGTGSASATHGGGSPPGTRGPGASVHDRNANSYVMVGTFNLPSDGSAVDVHINMEQAPIQSEPRVRLVMAQHMIRDIQTLLSRMECRGGPQPQHSQPPPQPPAVTPEPVALSSQTSEPVESEAPPREPMEAEEVEERAPAQNPELTPGPAPAGPTPAPETNAPNHPSPAEYVEVLQELQRLESRLQPFLQRYYEVLGAAATTDYNNNHEGREEDQRLINLVGESLRLLGNTFVALSDLRCNLACTPPRHLHVVRPMSHYTTPMVLQQAAIPIQINVGTTVTMTGNGTRPPPTPNAEAPPPGPGQASSVAPSSTNVESSAEGAPPPGPAPPPATSHPRVIRISHQSVEPVVMMHMNIQDSGTQPGGVPSAPTGPLGPPGHGQTLGQQVPGFPTAPTRVVIARPTPPQARPSHPGGPPVSGTLQGAGLGTNASLAQMVSGLVGQLLMQPVLVAQGTPGMAPPPAPATASASAGTTNTATTAGPAPGGPAQPPPTPQPSMADLQFSQLLGNLLGPAGPGAGGPGVASPTITVAMPGVPAFLQGMTDFLQATQTAPPPPPPPPPPPPAPEQQTMPPPGSPSGGAGSPGGLGLESLSPEFFTSVVQGVLSSLLGSLGARAGSSESIAAFIQRLSGSSNIFEPGADGALGFFGALLSLLCQNFSMVDVVMLLHGHFQPLQRLQPQLRSFFHQHYLGGQEPTPSNIRMATHTLITGLEEYVRESFSLVQVQPGVDIIRTNLEFLQEQFNSIAAHVLHCTDSGFGARLLELCNQGLFECLALNLHCLGGQQMELAAVINGRIRRMSRGVNPSLVSWLTTMMGLRLQVVLEHMPVGPDAILRYVRRVGDPPQPLPEEPMEVQGAERASPEPQRENASPAPGTTAEEAMSRGPPPAPEGGSRDEQDGASAETEPWAAAVPPEWVPIIQQDIQSQRKVKPQPPLSDAYLSGMPAKRRKLRSDIQKRLQEDPNYSPQRFPNAQRAFADDP

SEQ ID NO: 345170 - protein, 321 aa, Artificial Sequence
  derived and/or modified sequence
MERKNQTAITEFIILGFSNLNEWQFLLFTIFFLTYFCTLGGNILIILTTVTDPHLHTPMYYFLGNLAFIDICYTTSNVPQMMVHLLSKKKSISYVGCVVQLFAFVFFVGSECLLLAAMAYDRYIAICNPLRYSVILSKVLCNQLAASCWAAGFLNSVVHTVLTFCLPFCGNNQINYFFCDIPPLLILSCGNTSVNELALLSTGVFIGWTPFLCIVLSYICIISTILRIQSSEGRRKAFSTCASHLAIVFLFYGSAIFTYVRPISTYSLKKDRLVSVLYSVVTPMLNPIIYTLRNKDIKEAVKTIGSKWQPPISSLDSKLTY

SEQ ID NO: 345171 - DNA, 966 bp, Artificial Sequence
  derived and/or modified sequence
atggagagaaagaaccagaccgccatcaccgagttcatcatcctgggcttcagcaacctgaacgagtggcagttcctgctgttcaccatcttcttcctgacctacttctgcaccctgggcggcaacatcctgatcatcctgaccaccgtgaccgacccccacctgcacacccccatgtactacttcctgggcaacctggccttcatcgacatctgctacaccaccagcaacgtgccccagatgatggtgcacctgctgagcaagaagaagagcatcagctacgtgggctgcgtggtgcagctgttcgccttcgtgttcttcgtgggcagcgagtgcctgctgctggccgccatggcctacgacagatacatcgccatctgcaaccccctgagatacagcgtgatcctgagcaaggtgctgtgcaaccagctggccgccagctgctgggccgccggcttcctgaacagcgtggtgcacaccgtgctgaccttctgcctgcccttctgcggcaacaaccagatcaactacttcttctgcgacatcccccccctgctgatcctgagctgcggcaacaccagcgtgaacgagctggccctgctgagcaccggcgtgttcatcggctggacccccttcctgtgcatcgtgctgagctacatctgcatcatcagcaccatcctgagaatccagagcagcgagggcagaagaaaggccttcagcacctgcgccagccacctggccatcgtgttcctgttctacggcagcgccatcttcacctacgtgagacccatcagcacctacagcctgaagaaggacagactggtgagcgtgctgtacagcgtggtgacccccatgctgaaccccatcatctacaccctgagaaacaaggacatcaaggaggccgtgaagaccatcggcagcaagtggcagccccccatcagcagcctggacagcaagctgacctactag

SEQ ID NO: 345172 - DNA, 966 bp, Artificial Sequence
  derived and/or modified sequence
atggagcgcaaaaaccaaacggcaattacagagttcataattctcggctttagtaatctgaatgagtggcaattcttactgtttaccatctttttcctcacctatttctgtacgctgggcggcaacattttaataatcttaacgacggttaccgaccctcatctgcatactccaatgtactattttcttggaaacctcgcctttattgacatttgttacactacttccaacgttccacagatgatggtccatctgctcagcaaaaaaaagtccatcagctatgtgggctgcgtggttcagctcttcgcttttgtttttttcgtcggcagtgagtgcctcctgctggcggccatggcgtacgaccgttatattgctatctgcaatccactgcggtattcagtgatcctcagcaaagtcttgtgcaatcaactggcagccagttgctgggcagccggtttccttaatagtgtggttcatacggtactgactttctgtctccccttctgtggcaataatcagataaattacttcttttgtgacattcccccattgctcattctgtcttgcggaaatactagcgtgaatgagctggccctgctgagtaccggagtgttcattggctggacaccgttcctgtgtatcgtgctctcttacatctgcataatctccactattctgagaattcagagctcagagggacgccggaaggctttctccacatgcgcctcccacttagcaatcgtctttttgttctatggctccgctatctttacatacgtgcgcccaatctcaacatattccctcaaaaaggatcgcttggtcagcgtactgtacagtgtggtcacccccatgctcaacccaattatctatactcttaggaacaaggatatcaaagaggctgtgaagactatagggtctaagtggcagccccccatctcctcgctggattcgaaattgacctactag

SEQ ID NO: 345173 - DNA, 966 bp, Artificial Sequence
  derived and/or modified sequence
atggagaggaagaaccagacagccatcacagagttcatcatcctgggcttcagcaacctgaatgagtggcagttcctgctcttcaccatcttcttcctgacctacttctgcaccctgggcggcaacatcctgatcatcctgaccaccgtgacagacccccacctgcacacccccatgtactacttcctgggcaacctggccttcatcgacatctgctacaccaccagcaatgtgccccagatgatggtgcacctgctgagcaagaagaagagcatctcctatgtgggctgtgtggtgcagctgtttgcctttgtgttctttgtgggctctgaatgtctgctgctggccgccatggcctatgaccgctacatcgccatctgcaaccccctgcgctacagcgtcatcctgagcaaggtgctgtgcaaccagctggccgccagctgctgggccgccggcttcctgaacagcgtggtgcacacagtgctgaccttctgcctgcccttctgtggcaacaaccagatcaactacttcttctgtgacatcccccccctgctgatcctgagctgtggcaacacctctgtgaatgagctggccctgctgagcactggagtcttcatcggctggacccccttcctgtgcatcgtgctgagctacatctgcatcatcagcaccatcctgcgcatccagagcagcgagggccgcaggaaggccttcagcacctgtgccagccacctggccatcgtgttcctgttctacggcagcgccatcttcacctacgtgcggcccatcagcacctacagcctgaagaaggaccggctggtgtctgtgctgtacagcgtggtgacccccatgctgaaccccatcatctacaccctgaggaacaaggacatcaaggaggccgtgaagaccatcggcagcaagtggcagccccccatcagcagcctggacagcaagctgacctactag

SEQ ID NO: 345174 - DNA, 966 bp, Artificial Sequence
  derived and/or modified sequence
atggagcggaagaaccagaccgccatcaccgagttcatcatcctgggattcagtaaccttaatgagtggcagttcctgctatttaccatcttcttcttgacatacttctgcactcttggtgggaacattctgatcatactcaccactgtcactgaccctcatctccatacccctatgtattacttcctgggaaatctagcattcattgacatatgctacacaacgtcaaacgtacctcagatgatggtacaccttctgtctaaaaaaaagtcgatctcttacgtggggtgtgtagttcagctgtttgccttcgtattcttcgttggtagcgaatgcctccttctggccgccatggcatatgatcgatacattgccatatgtaaccctctgcgatacagcgttatcctttccaaagtgctctgtaaccagctcgccgcctcctgttgggccgcaggattcctgaacagcgttgtgcatacagtgttaacattttgtctccccttttgcggtaataatcagatcaactatttcttttgtgacatccctccactgcttattctcagttgcggtaacacctccgtgaatgaattggccttgcttagcactggagtgtttatcggctggacccccttcctgtgcatagtgcttagctacatttgtataatctctactattctgagaattcaatcttccgaggggcgtagaaaggccttcagtacttgcgctagccatctggcgatcgtgttccttttctacgggtctgcgatttttacgtatgtaagacctattagcacctatagtctgaaaaaagaccggctggtgagcgtcctgtacagtgtcgtcaccccaatgctgaaccccataatctacaccttgaggaacaaagacatcaaagaagctgtgaagacaattggaagtaagtggcagccgcctatatcttcactggattctaaactcacctattag

SEQ ID NO: 345175 - DNA, 1048 bp, Artificial Sequence
  derived and/or modified sequence
gtcatgctattgcagcatatgattcatttttataatctggtcttctctttgcccaattcctgaaaggaaaccaggcgacatcatggaaagaaagaatcaaacagctataactgaattcatcatcttgggattctccaacctaaatgaatggcagtttttactattcaccatcttctttctgacttatttctgtactttgggaggaaatatattaattatcttgacgactgtgactgatccacacctgcatacacctatgtattattttctagggaacttggcctttattgacatctgctacaccaccagcaatgtcccccagatgatggtgcacctcctctcaaagaaaaaaagcatttcttatgtggggtgtgtggttcaactttttgcatttgttttctttgtaggatcagagtgtctcctactggcagcaatggcatatgatcgttacattgcaatctgcaatcctttaaggtattcagttattctgagcaaggttctatgcaatcaattagcagcctcatgctgggctgctggtttccttaactcagtggtgcatacagtgttgacattctgcctgcccttctgtggcaacaatcagattaattacttcttctgtgacatcccccctttgctgatcttgtcttgtggaaacacttctgtcaatgagttggcactgctatccactggggtcttcattggttggactcctttcctttgtatcgtactttcctacatttgcataatctccaccatcttgaggatccagtcctcagagggaagacgaaaagccttttctacatgtgcctcccacctggccattgtctttctcttttatggcagcgccatctttacatatgtacggcccatctcaacttactcattaaagaaagataggttggtttcagtgttgtacagtgttgttacccccatgctaaaccctataatttacacattgaggaataaggacatcaaagaagctgtcaaaactatagggagcaagtggcagccaccaatttcctctttggatagtaaactcacttattga

SEQ ID NO: 345176 - DNA, 1266 bp, Artificial Sequence
  derived and/or modified sequence
gagctgaaggtaggaaattccaacattctgaagtcttcagcaaatcttagcagatcatctcctcctcacagtcctgtctttagagaacagggtcgatatttcggcttctgcgaactcagatgtcatcttttcttccctaaagtttttaaagttcctattgatatattcccctgcctagagggtttggtggtcgttttcttcctcttaactttattaaggtcatgctattgcagcatatgattcatttttataatctggtcttctctttgcccaattcctgaaaggaaaccaggcgacatcatggaaagaaagaatcaaacagctataactgaattcatcatcttgggattctccaacctaaatgaatggcagtttttactattcaccatcttctttctgacttatttctgtactttgggaggaaatatattaattatcttgacgactgtgactgatccacacctgcatacacctatgtattattttctagggaacttggcctttattgacatctgctacaccaccagcaatgtcccccagatgatggtgcacctcctctcaaagaaaaaaagcatttcttatgtggggtgtgtggttcaactttttgcatttgttttctttgtaggatcagagtgtctcctactggcagcaatggcatatgatcgttacattgcaatctgcaatcctttaaggtattcagttattctgagcaaggttctatgcaatcaattagcagcctcatgctgggctgctggtttccttaactcagtggtgcatacagtgttgacattctgcctgcccttctgtggcaacaatcagattaattacttcttctgtgacatcccccctttgctgatcttgtcttgtggaaacacttctgtcaatgagttggcactgctatccactggggtcttcattggttggactcctttcctttgtatcgtactttcctacatttgcataatctccaccatcttgaggatccagtcctcagagggaagacgaaaagccttttctacatgtgcctcccacctggccattgtctttctcttttatggcagcgccatctttacatatgtacggcccatctcaacttactcattaaagaaagataggttggtttcagtgttgtacagtgttgttacccccatgctaaaccctataatttacacattgaggaataaggacatcaaagaagctgtcaaaactatagggagcaagtggcagccaccaatttcctctttggatagtaaactcacttattga

SEQ ID NO: 345177 - DNA, 966 bp, Artificial Sequence
  derived and/or modified sequence
atggaacgaaaaaatcaaactgccataactgagtttattatactcggcttctcaaacctgaacgagtggcagtttctcctgtttacaattttctttctgacatacttttgtaccctgggcggaaatattctgattatacttactactgttaccgatccacacctacacacccctatgtattactttctaggtaacctcgcattcattgatatttgctatactacctcgaatgttccacagatgatggttcacctgttgtccaaaaagaaatccattagttatgtaggatgcgttgtgcagctgttcgcttttgtgtttttcgttggatcagaatgtctgctgcttgctgccatggcctatgaccgctatatcgccatatgtaatcccctgagatacagcgtgattctgtccaaggtactgtgcaatcaactggccgctagttgctgggccgctgggtttcttaactctgtcgtgcacaccgtcctgacgttctgtcttcccttttgcggtaacaatcaaataaattattttttctgcgacattcccccactccttatcctcagctgcggcaacactagcgtgaacgaactggcccttctgtctacaggtgttttcattggatggacgccttttctctgcatcgtgctgagctacatctgtattatatcaactattttgcggatacagagttccgaagggagaaggaaggctttctccacctgcgcttcgcatctggcgatcgtatttctcttctacggttccgccattttcacatacgtgcggcctatcagcacatatagcctgaaaaaggatcggcttgtctccgtcctatatagcgtcgtgacacccatgctaaacccgatcatttacacactaaggaacaaagatatcaaagaggccgtgaagaccattggcagtaagtggcagccaccaatttctagtctggactccaaactgacgtactag

SEQ ID NO: 345178 - DNA, 966 bp, Artificial Sequence
  derived and/or modified sequence
atggaacggaaaaaccaaacggctattacggagtttatcattcttggcttctctaacttaaatgagtggcagtttttactgttcacgatctttttcctgacatacttttgcacccttggaggaaacattcttataatcctcaccactgtcacggaccctcacctacacacgcctatgtactactttctcggcaatctcgcgtttatagacatatgctacaccacatctaacgtcccccagatgatggtgcaccttctgtccaaaaagaagagcatttcctatgtggggtgcgttgtgcagctgtttgcctttgtattctttgtgggttcagaatgtcttctactcgctgctatggcctatgataggtatatcgcgatttgcaacccgcttagatacagcgttatcctgtcaaaggtgctctgtaatcagctggccgccagctgttgggctgccgggttccttaattcagtcgtccataccgtactcaccttctgcctcccgttctgtgggaataaccagatcaattatttcttttgcgacattccgcccctcctgatcctgtcttgcgggaacacctcggtcaacgagctggctctgctttcaactggggtttttatcggttggactcctttcctctgtatcgtcttgtcctacatctgcatcatctcaaccatcttgcggatacagagtagtgaggggaggcggaaggcgttctccacttgcgcctcccacctcgccatcgtgttcctattctacggctccgccatattcacctatgtccgtcctatctccacatactcactgaaaaaggacagacttgtgagcgttctgtactcggtggtgacgccaatgctgaaccctataatatacaccctgaggaataaggacatcaaggaggccgtaaagacgataggatctaaatggcagcctccaatatcgtctctggacagcaaactgacatactag

SEQ ID NO: 345179 - DNA, 966 bp, Artificial Sequence
  derived and/or modified sequence
atggagcggaagaaccagaccgccatcaccgagttcatcatcctggggttctctaacctgaatgagtggcagtttctcctattcaccatcttctttcttacttatttctgtaccttaggaggcaatatccttataattctcacgaccgttacagaccctcatctgcatacccctatgtactacttcctggggaacctagcctttattgacatttgctacacgacctcaaatgtcccccaaatgatggtccacctgctttcgaagaaaaaaagcatctcttatgtcggatgtgtggtccaactgttcgcttttgttttctttgtggggagtgagtgcttgctcctggctgcaatggcgtatgatcgctacatcgctatttgcaatccactgagatatagcgtgattctgtccaaggttctgtgtaaccaactggccgcttcctgctgggccgcaggcttcctgaatagtgtagttcataccgtactgacattctgcctgccattctgcggcaacaaccagatcaattactttttttgcgatatccctccccttctaatactgtcctgtggcaacactagtgtgaacgagcttgccttgctcagtaccggagtcttcataggatggacaccattcctgtgcatcgtgctatcatatatctgcattatttctacaatcttgagaattcagtcatctgaagggagacgtaaggcgttttccacctgtgcctcccacttggcaattgtgtttcttttctatggtagcgcaatttttacctatgttcgccctatctcgacctacagtctcaaaaaggacagactagtaagcgtcctatacagtgtcgtcacaccgatgctcaaccccattatttacactctcagaaataaagatattaaggaagccgtcaagaccatcggctcaaagtggcaacccccaattagcagtttggacagtaagctgacctattag

SEQ ID NO: 345180 - DNA, 966 bp, Artificial Sequence
  derived and/or modified sequence
atggaacggaaaaatcagacagctataaccgagttcattatccttggattcagcaatctcaatgagtggcaattcttactgttcaccatattctttctcacctacttttgcaccctcggcggaaacattctcatcatcttgacaaccgttactgacccacatttgcatacccccatgtattatttcctggggaacctggcatttattgatatatgctataccacctctaacgtgccacagatgatggtacacttgctgtccaaaaagaagagcatcagttacgtcggctgtgttgtgcagctgtttgcgtttgtgttttttgtcggctccgagtgcctcctgttggcagccatggcctacgaccgttatatcgctatctgtaatccgctccgctactccgtcattctgtctaaggtcctgtgcaaccagctggcagccagctgttgggctgccggttttctaaatagtgtggtgcacaccgttcttaccttctgtctacccttttgcggcaataaccagatcaattattttttctgtgacatcccgcctctcctgattctaagctgcggtaacacttctgtgaatgagctcgccttgttgtcaacaggcgtgtttattggatggacacccttcctttgtatcgtgctaagctatatctgcatcatttcgaccattctcaggattcagtcatcggagggcaggcggaaggcttttagcacctgtgctagccacctggcaattgtgtttctgttttatgggtccgcaatctttacctatgtgaggcctattagtacctatagcctgaagaaggacaggctggtgagcgtcctctattcagttgtgacacccatgctgaatcccatcatctacacgctccgtaataaggatatcaaggaggccgtgaagaccatcggaagcaagtggcagcctccaatctccagtctcgatagcaaactaacttactag

SEQ ID NO: 345181 - protein, 299 aa, Artificial Sequence
  derived and/or modified sequence
MAVMAPRTLVLLLSGALALTQTWAGSHSMRYFYTSVSRPGRGEPRFIAVGYVDDTQFVRFDSDAASQRMEPRAPWIEQEGPEYWDRNTRNVKAHSQTDRANLGTLRGYYNQSEDGSHTIQRMYGCDVGPDGRFLRGYQQDAYDGKDYIALNEDLRSWTAADMAAQITQRKWETAHEAEQWRAYLEGRCVEWLRRYLENGKETLQRTDAPKTHMTHHAVSDHEATLRCWALSFYPAEITLTWQRDGEDQTQDTELVETRPAGDGTFQKWASVVVPSGQEQRYTCHVQHEGLPKPLTLRWV

SEQ ID NO: 345182 - protein, 365 aa, Artificial Sequence
  derived and/or modified sequence
MAVMAPRTLVLLLSGALALTQTWAGSHSMRYFYTSVSRPGRGEPRFIAVGYVDDTQFVRFDSDAASQRMEPRAPWIEQEGPEYWDRNTRNVKAHSQTDRANLGTLRGYYNQSEDGSHTIQRMYGCDVGPDGRFLRGYQQDAYDGKDYIALNEDLRSWTAADMAAQITQRKWETAHEAEQWRAYLEGRCVEWLRRYLENGKETLQRTDAPKTHMTHHAVSDHEATLRCWALSFYPAEITLTWQRDGEDQTQDTELVETRPAGDGTFQKWASVVVPSGQEQRYTCHVQHEGLPKPLTLRWEPSSQPTIPIVGIIAGLVLFGAVIAGAVVAAVMWRRKSSDRKGGSYSQAASSDSAQGSDMSLTACKV

SEQ ID NO: 345183 - protein, 371 aa, Artificial Sequence
  derived and/or modified sequence
MAVMAPRTLVLLLSGALALTQTWAGSHSMRYFYTSVSRPGRGEPRFIAVGYVDDTQFVRFDSDAASQRMEPRAPWIEQEGPEYWDRNTRNVKAHSQTDRANLGTLRGYYNQSEDGSHTIQRMYGCDVGPDGRFLRGYQQDAYDGKDYIALNEDLRSWTAADMAAQITQRKWETAHEAEQWRAYLEGRCVEWLRRYLENGKETLQRTDAPKTHMTHHAVSDHEATLRCWALSFYPAEITLTWQRDGEDQTQDTELVETRPAGDGTFQKWASVVVPSGQEQRYTCHVQHEGLPKPLTLRWEPSSQPTIPIVGIIAGLVLFGAVIAGAVVAAVMWRRKSSGGEGMKDRKGGSYSQAASSDSAQGSDMSLTACKV

SEQ ID NO: 345184 - protein, 299 aa, Artificial Sequence
  derived and/or modified sequence
  misc_feature (1)..(1): Xaa can be any naturally occurring amino acid
XAVMAPRTLVLLLSGALALTQTWAGSHSMRYFFTSVSRPGRGEPRFIAVGYVDDTQFVRFDSDAASQRMEPRAPWIEQEGPEYWDGETRKVKAHSQTHRVDLGTLRGYYNQSEAGSHTVQRMYGCDVGSDWRFLRGYHQYAYDGKDYIALKEDLRSWTAADMAAQTTKHKWEAAHVAEQLRAYLEGTCVEWLRRYLENGKETLQRTDAPKTHMTHHAVSDHEATLRCWALSFYPAEITLTWQRDGEDQTQDTELVETRPAGDGTFQKWAAVVVPSGQEQRYTCHVQHEGLPKPLTLRWV

SEQ ID NO: 345185 - protein, 299 aa, Artificial Sequence
  derived and/or modified sequence
MAVMAPRTLLLLLLGALALTQTWAGSHSMRYFFTSVSRPGRGEPRFIAVGYVDDTQFVRFDSDAASQRMEPRAPWIEQEGPEYWDQETRNVKAHSQTDRESLRIALRYYNQSEAGSHTIQMMYGCDVGPDGRLLRGYQQDAYDGKDYIALNEDLRSWTAADMAAQITQRKWEAARVAEQLRAYLEGTCVEWLRRYLENGKETLQRTDAPKTHMTHHAVSDHEATLRCWALSFYPAEITLTWQRDGEDQTQDTELVETRPAGDGTFQKWASVVVPSGQEQRYTCHVQHEGLPKPLTLRWV

SEQ ID NO: 345186 - protein, 371 aa, Artificial Sequence
  derived and/or modified sequence
MAVMAPRTLVLLLSGALALTQTWAGSHSMRYFFTSVSRPGRGEPRFIAVGYVDDTQFVRFDSDAASQRMEPRAPWIEQEGPEYWDGETRKVKAHSQTHRVDLGTLRGYYNQSEAGSHTVQRMYGCDVGSDWRFLRGYHQYAYDGKDYIALKEDLRSWTAADMAAQTTKHKWEAAHVAEQLRAYLEGTCVEWLRRYLENGKETLQRTDAPKTHMTHHAVSDHEATLRCWALSFYPAEITLTWQRDGEDQTQDTELVETRPAGDGTFQKWAAVVVPSGQEQRYTCHVQHEGLPKPLTLRWEPSSQPTIPIVGIIAGLVLFGAVITGAVVAAVMWRRKSSGGEGVKDRKGGSYSQAASSDSAQGSDVSLTACKV

SEQ ID NO: 345187 - protein, 365 aa, Artificial Sequence
  derived and/or modified sequence
  misc_feature (1)..(1): Xaa can be any naturally occurring amino acid
XAVMAPRTLVLLLSGALALTQTWAGSHSMRYFFTSVSRPGRGEPRFIAVGYVDDTQFVRFDSDAASQRMEPRAPWIEQEGPEYWDGETRKVKAHSQTHRVDLGTLRGYYNQSEAGSHTVQRMYGCDVGSDWRFLRGYHQYAYDGKDYIALKEDLRSWTAADMAAQTTKHKWEAAHVAEQLRAYLEGTCVEWLRRYLENGKETLQRTDAPKTHMTHHAVSDHEATLRCWALSFYPAEITLTWQRDGEDQTQDTELVETRPAGDGTFQKWAAVVVPSGQEQRYTCHVQHEGLPKPLTLRWEPSSQPTIPIVGIIAGLVLFGAVITGAVVAAVMWRRKSSDRKGGSYSQAASSDSAQGSDVSLTACKV

SEQ ID NO: 345188 - protein, 299 aa, Artificial Sequence
  derived and/or modified sequence
MAVMAPRTLVLLLSGALALTQTWAGSHSMRYFFTSVSRPGRGEPRFIAVGYVDDTQFVRFDSDAASQRMEPRAPWIEQEGPEYWDGETRKVKAHSQTHRVDLGTLRGYYNQSEAGSHTVQRMYGCDVGSDWRFLRGYHQYAYDGKDYIALKEDLRSWTAADMAAQTTKHKWEAAHVAEQLRAYLEGTCVEWLRRYLENGKETLQRTDAPKTHMTHHAVSDHEATLRCWALSFYPAEITLTWQRDGEDQTQDTELVETRPAGDGTFQKWAAVVVPSGQEQRYTCHVQHEGLPKPLTLRWV

SEQ ID NO: 345189 - protein, 365 aa, Artificial Sequence
  derived and/or modified sequence
MAVMAPRTLLLLLLGALALTQTWAGSHSMRYFFTSVSRPGRGEPRFIAVGYVDDTQFVRFDSDAASQRMEPRAPWIEQEGPEYWDQETRNVKAHSQTDRESLRIALRYYNQSEAGSHTIQMMYGCDVGPDGRLLRGYQQDAYDGKDYIALNEDLRSWTAADMAAQITQRKWEAARVAEQLRAYLEGTCVEWLRRYLENGKETLQRTDAPKTHMTHHAVSDHEATLRCWALSFYPAEITLTWQRDGEDQTQDTELVETRPAGDGTFQKWASVVVPSGQEQRYTCHVQHEGLPKPLTLRWEPSSQPTIPIVGIIAGLVLFGAMFAGAVVAAVRWRRKSSDRKGGSYSQAASSDSAQGSDMSLTACKV

SEQ ID NO: 345190 - protein, 371 aa, Artificial Sequence
  derived and/or modified sequence
  misc_feature (1)..(1): Xaa can be any naturally occurring amino acid
XAVMAPRTLVLLLSGALALTQTWAGSHSMRYFFTSVSRPGRGEPRFIAVGYVDDTQFVRFDSDAASQRMEPRAPWIEQEGPEYWDGETRKVKAHSQTHRVDLGTLRGYYNQSEAGSHTVQRMYGCDVGSDWRFLRGYHQYAYDGKDYIALKEDLRSWTAADMAAQTTKHKWEAAHVAEQLRAYLEGTCVEWLRRYLENGKETLQRTDAPKTHMTHHAVSDHEATLRCWALSFYPAEITLTWQRDGEDQTQDTELVETRPAGDGTFQKWAAVVVPSGQEQRYTCHVQHEGLPKPLTLRWEPSSQPTIPIVGIIAGLVLFGAVITGAVVAAVMWRRKSSGGEGVKDRKGGSYSQAASSDSAQGSDVSLTACKV

SEQ ID NO: 345191 - protein, 365 aa, Artificial Sequence
  derived and/or modified sequence
MAVMAPRTLLLLLLGALALTQTWAGSHSMRYFTTSVSRPGRGEPRFIAVGYVDDTQFVRFDSDAASQRMEPRAPWIEQEGPEYWDLQTRNVKAQSQTDRANLGTLRGYYNQSEAGSHTIQMMYGCDVGSDGRFLRGYRQDAYDGKDYIALNEDLRSWTAADMAAQITQRKWEAARVAEQLRAYLEGTCVEWLRRYLENGKETLQRTDAPKTHMTHHAVSDHEATLRCWALSFYPAEITLTWQRDGEDQTQDTELVETRPAGDGTFQKWASVVVPSGQEQRYTCHVQHEGLPKPLTLRWEPSSQPTIPIVGIIAGLVLFGAVFAGAVVAAVRWRRKSSDRKGGSYSQAASSDSAQGSDMSLTACKV

SEQ ID NO: 345192 - protein, 365 aa, Artificial Sequence [sequence omitted]

SEQ ID NO: 345193 - protein, 342 aa, Artificial Sequence
  derived and/or modified sequence
MAVMAPRTLLLLLLGALALTQTWAGSHSMRYFTTSVSRPGRGEPRFIAVGYVDDTQFVRFDSDAASQRMEPRAPWIEQEGPEYWDLQTRNVKAQSQTDRANLGTLRGYYNQSEAGSHTIQMMYGCDVGSDGRFLRGYRQDAYDGKDYIALNEDLRSWTAADMAAQITQRKWEAARVAEQLRAYLEGTCVEWLRRYLENGKETLQRTDAPKTHMTHHAVSDHEATLRCWALSFYPAEITLTWQRDGEDQTQDTELVETRPAGDGTFQKWASVVVPSGQEQRYTCHVQHEGLPKPLTLRWEPSSQPTIPIVGIIAGLVLFGAVFAGAVVAAVRWRRKSSGGVKG

SEQ ID NO: 345194 - protein, 362 aa, Artificial Sequence
  derived and/or modified sequence
MAPRTLLLLLSGALALTQTWAGSHSMRYFFTSVSRPGRGEPRFIAVGYVDDTQFVRFDSDAASQRMEPRAPWIEQEGPEYWDGETRKVKAHSQTHRVDLGTLRGYYNQSEAGSHTVQRMYGCDVGSDWRFLRGYHQYAYDGKDYIALKEDLRSWTAADMAAQTTKHKWEAAHVAEQLRAYLEGTCVEWLRRYLENGKETLQRTDAPKTHMTHHAVSDHEATLRCWALSFYPAEITLTWQRDGEDQTQDTELVETRPAGDGTFQKWAAVVVPSGQEQRYTCHVQHEGLPKPLTLRWEPSSQPTIPIVGIIAGLVLFGAVITGAVVAAVMWRRKSSDRKGGSYSQAASSDSAQGSDVSLTACKV

SEQ ID NO: 345195 - protein, 372 aa, Artificial Sequence
  derived and/or modified sequence
MRVMAPRTLILLLSGALALTETWACSHSMRYFYTAVSRPGRGEPRFIAVGYVDDTQFVQFDSDAASPRGEPRAPWVEQEGPEYWDRETQKYKRQAQTDRVNLRKLRGYYNQSEAGSHTLQRMYGCDLGPDGRLLRGYNQFAYDGKDYIALNEDLRSWTAADKAAQITQRKWEAAREAEQRRAYLEGTCVEWLRRYLENGKKTLQRAEHPKTHVTHHPVSDHEATLRCWALGFYPAEITLTWQRDGEDQTQDTELVETRPAGDGTFQKWAAVVVPSGEEQRYTCHVQHEGLPEPLTLRWGPSSQPTIPIVGIVAGLAVLAVLAVLGAVMAVVMCRRKSSGHFLPTGGKGGSCSQAASSNSAQGSDESLIACKA

SEQ ID NO: 345196 - protein, 366 aa, Artificial Sequence
  derived and/or modified sequence
MRVMAPRTLILLLSGALALTETWACSHSMRYFYTAVSRPGRGEPRFIAVGYVDDTQFVQFDSDAASPRGEPRAPWVEQEGPEYWDRETQKYKRQAQTDRVNLRKLRGYYNQSEAGSHTLQRMYGCDLGPDGRLLRGYNQFAYDGKDYIALNEDLRSWTAADKAAQITQRKWEAAREAEQRRAYLEGTCVEWLRRYLENGKKTLQRAEHPKTHVTHHPVSDHEATLRCWALGFYPAEITLTWQRDGEDQTQDTELVETRPAGDGTFQKWAAVVVPSGEEQRYTCHVQHEGLPEPLTLRWGPSSQPTIPIVGIVAGLAVLAVLAVLGAVMAVVMCRRKSSGGKGGSCSQAASSNSAQGSDESLIACKA

SEQ ID NO: 345197 - protein, 372 aa, Artificial Sequence
  derived and/or modified sequence
MRVMAPRTLILLLSGALALTETWAGSHSMRYFYTAVSRPGRGEPHFIAVGYVDDTQFVRFDSDAASPRGEPRAPWVEQEGPEYWDRETQKYKRQAQTDRVSLRNLRGYYNQSEAGSHIIQRMYGCDVGPDGRLLRGYDQYAYDGKDYIALNEDLRSWTAADTAAQITQRKWEAAREAEQLRAYLEGLCVEWLRRYLKNGKETLQRAEHPKTHVTHHPVSDHEATLRCWALGFYPAEITLTWQWDGEDQTQDTELVETRPAGDGTFQKWAAVVVPSGEEQRYTCHVQHEGLPEPLTLRWEPSSQPTIPIVGIVAGLAVLAVLAVLGAVVAVVMCRRKSSGHFLPTGGKGGSCSQAASSNSAQGSDESLIACKA

SEQ ID NO: 345198 - protein, 368 aa, Artificial Sequence
  derived and/or modified sequence
MRVMAPRTLILLLSGALALTETWAGSHSMRYFYTAVSRPGRGEPHFIAVGYVDDTQFVRFDSDAASPRGEPRAPWVEQEGPEYWDRETQKYKRQAQTDRVSLRNLRGYYNQSEAGSHIIQRMYGCDVGPDGRLLRGYDQYAYDGKDYIALNEDLRSWTAADTAAQITQRKWEAAREAEQLRAYLEGLCVEWLRRYLKNGKETLQRAEHPKTHVTHHPVSDHEATLRCWALGFYPAEITLTWQWDGEDQTQDTELVETRPAGDGTFQKWAAVVVPSGEEQRYTCHVQHEGLPEPLTLRWEPSSQPTIPIVGIVAGLAVLAVLAVLGAVVAVVMCRRKSSAACVGLRCRISSHLSFVTSRASGISFCKGI

SEQ ID NO: 345199 - protein, 368 aa, Artificial Sequence
  derived and/or modified sequence
MRVMAPRTLILLLSGALALTETWACSHSMRYFYTAVSRPGRGEPRFIAVGYVDDTQFVQFDSDAASPRGEPRAPWVEQEGPEYWDRETQKYKRQAQTDRVNLRKLRGYYNQSEAGSHTLQRMYGCDLGPDGRLLRGYNQFAYDGKDYIALNEDLRSWTAADKAAQITQRKWEAAREAEQRRAYLEGTCVEWLRRYLENGKKTLQRAEHPKTHVTHHPVSDHEATLRCWALGFYPAEITLTWQRDGEDQTQDTELVETRPAGDGTFQKWAAVVVPSGEEQRYTCHVQHEGLPEPLTLRWGPSSQPTIPIVGIVAGLAVLAVLAVLGAVMAVVMCRRKSSAACVGLRCRISSHLSFVTSRASGISFCKGI

SEQ ID NO: 345200 - protein, 366 aa, Artificial Sequence
  derived and/or modified sequence
MRVMAPRTLILLLSGALALTETWAGSHSMRYFYTAVSRPGRGEPHFIAVGYVDDTQFVRFDSDAASPRGEPRAPWVEQEGPEYWDRETQKYKRQAQTDRVSLRNLRGYYNQSEAGSHIIQRMYGCDVGPDGRLLRGYDQYAYDGKDYIALNEDLRSWTAADTAAQITQRKWEAAREAEQLRAYLEGLCVEWLRRYLKNGKETLQRAEHPKTHVTHHPVSDHEATLRCWALGFYPAEITLTWQWDGEDQTQDTELVETRPAGDGTFQKWAAVVVPSGEEQRYTCHVQHEGLPEPLTLRWEPSSQPTIPIVGIVAGLAVLAVLAVLGAVVAVVMCRRKSSGGKGGSCSQAASSNSAQGSDESLIACKA

SEQ ID NO: 345201 - DNA, 900 bp, Artificial Sequence
  derived and/or modified sequence
tgagccgtgatggcccccagaaccctggtgctgctgctgagcggcgccctggccctgacccagacctgggccggcagccacagcatgagatacttcttcaccagcgtgagcagacccggcagaggcgagcccagattcatcgccgtgggctacgtggacgacacccagttcgtgagattcgacagcgacgccgccagccagagaatggagcccagagccccctggatcgagcaggagggccccgagtactgggacggcgagaccagaaaggtgaaggcccacagccagacccacagagtggacctgggcaccctgagaggctactacaaccagagcgaggccggcagccacaccgtgcagagaatgtacggctgcgacgtgggcagcgactggagattcctgagaggctaccaccagtacgcctacgacggcaaggactacatcgccctgaaggaggacctgagaagctggaccgccgccgacatggccgcccagaccaccaagcacaagtgggaggccgcccacgtggccgagcagctgagagcctacctggagggcacctgcgtggagtggctgagaagatacctggagaacggcaaggagaccctgcagagaaccgacgcccccaagacccacatgacccaccacgccgtgagcgaccacgaggccaccctgagatgctgggccctgagcttctaccccgccgagatcaccctgacctggcagagagacggcgaggaccagacccaggacaccgagctggtggagaccagacccgccggcgacggcaccttccagaagtgggccgccgtggtggtgcccagcggccaggagcagagatacacctgccacgtgcagcacgagggcctgcccaagcccctgaccctgagatgggtgtag

SEQ ID NO: 345202 - DNA, 1116 bp, Artificial Sequence
  derived and/or modified sequence
atggccgtgatggcccccagaaccctggtgctgctgctgagcggcgccctggccctgacccagacctgggccggcagccacagcatgagatacttcttcaccagcgtgagcagacccggcagaggcgagcccagattcatcgccgtgggctacgtggacgacacccagttcgtgagattcgacagcgacgccgccagccagagaatggagcccagagccccctggatcgagcaggagggccccgagtactgggacggcgagaccagaaaggtgaaggcccacagccagacccacagagtggacctgggcaccctgagaggctactacaaccagagcgaggccggcagccacaccgtgcagagaatgtacggctgcgacgtgggcagcgactggagattcctgagaggctaccaccagtacgcctacgacggcaaggactacatcgccctgaaggaggacctgagaagctggaccgccgccgacatggccgcccagaccaccaagcacaagtgggaggccgcccacgtggccgagcagctgagagcctacctggagggcacctgcgtggagtggctgagaagatacctggagaacggcaaggagaccctgcagagaaccgacgcccccaagacccacatgacccaccacgccgtgagcgaccacgaggccaccctgagatgctgggccctgagcttctaccccgccgagatcaccctgacctggcagagagacggcgaggaccagacccaggacaccgagctggtggagaccagacccgccggcgacggcaccttccagaagtgggccgccgtggtggtgcccagcggccaggagcagagatacacctgccacgtgcagcacgagggcctgcccaagcccctgaccctgagatgggagcccagcagccagcccaccatccccatcgtgggcatcatcgccggcctggtgctgttcggcgccgtgatcaccggcgccgtggtggccgccgtgatgtggagaagaaagagcagcggcggcgagggcgtgaaggacagaaagggcggcagctacagccaggccgccagcagcgacagcgcccagggcagcgacgtgagcctgaccgcctgcaaggtgtag

SEQ ID NO: 345203 - DNA, 1098 bp, Artificial Sequence
  derived and/or modified sequence
tgagccgtgatggcccccagaaccctggtgctgctgctgagcggcgccctggccctgacccagacctgggccggcagccacagcatgagatacttcttcaccagcgtgagcagacccggcagaggcgagcccagattcatcgccgtgggctacgtggacgacacccagttcgtgagattcgacagcgacgccgccagccagagaatggagcccagagccccctggatcgagcaggagggccccgagtactgggacggcgagaccagaaaggtgaaggcccacagccagacccacagagtggacctgggcaccctgagaggctactacaaccagagcgaggccggcagccacaccgtgcagagaatgtacggctgcgacgtgggcagcgactggagattcctgagaggctaccaccagtacgcctacgacggcaaggactacatcgccctgaaggaggacctgagaagctggaccgccgccgacatggccgcccagaccaccaagcacaagtgggaggccgcccacgtggccgagcagctgagagcctacctggagggcacctgcgtggagtggctgagaagatacctggagaacggcaaggagaccctgcagagaaccgacgcccccaagacccacatgacccaccacgccgtgagcgaccacgaggccaccctgagatgctgggccctgagcttctaccccgccgagatcaccctgacctggcagagagacggcgaggaccagacccaggacaccgagctggtggagaccagacccgccggcgacggcaccttccagaagtgggccgccgtggtggtgcccagcggccaggagcagagatacacctgccacgtgcagcacgagggcctgcccaagcccctgaccctgagatgggagcccagcagccagcccaccatccccatcgtgggcatcatcgccggcctggtgctgttcggcgccgtgatcaccggcgccgtggtggccgccgtgatgtggagaagaaagagcagcgacagaaagggcggcagctacagccaggccgccagcagcgacagcgcccagggcagcgacgtgagcctgaccgcctgcaaggtgtag

SEQ ID NO: 345204 - DNA, 900 bp, Artificial Sequence
  derived and/or modified sequence
atggccgtgatggcccccagaaccctggtgctgctgctgagcggcgccctggccctgacccagacctgggccggcagccacagcatgagatacttcttcaccagcgtgagcagacccggcagaggcgagcccagattcatcgccgtgggctacgtggacgacacccagttcgtgagattcgacagcgacgccgccagccagagaatggagcccagagccccctggatcgagcaggagggccccgagtactgggacggcgagaccagaaaggtgaaggcccacagccagacccacagagtggacctgggcaccctgagaggctactacaaccagagcgaggccggcagccacaccgtgcagagaatgtacggctgcgacgtgggcagcgactggagattcctgagaggctaccaccagtacgcctacgacggcaaggactacatcgccctgaaggaggacctgagaagctggaccgccgccgacatggccgcccagaccaccaagcacaagtgggaggccgcccacgtggccgagcagctgagagcctacctggagggcacctgcgtggagtggctgagaagatacctggagaacggcaaggagaccctgcagagaaccgacgcccccaagacccacatgacccaccacgccgtgagcgaccacgaggccaccctgagatgctgggccctgagcttctaccccgccgagatcaccctgacctggcagagagacggcgaggaccagacccaggacaccgagctggtggagaccagacccgccggcgacggcaccttccagaagtgggccgccgtggtggtgcccagcggccaggagcagagatacacctgccacgtgcagcacgagggcctgcccaagcccctgaccctgagatgggtgtag

SEQ ID NO: 345205 - DNA, 1116 bp, Artificial Sequence
  derived and/or modified sequence
tgagccgtgatggcccccagaaccctggtgctgctgctgagcggcgccctggccctgacccagacctgggccggcagccacagcatgagatacttcttcaccagcgtgagcagacccggcagaggcgagcccagattcatcgccgtgggctacgtggacgacacccagttcgtgagattcgacagcgacgccgccagccagagaatggagcccagagccccctggatcgagcaggagggccccgagtactgggacggcgagaccagaaaggtgaaggcccacagccagacccacagagtggacctgggcaccctgagaggctactacaaccagagcgaggccggcagccacaccgtgcagagaatgtacggctgcgacgtgggcagcgactggagattcctgagaggctaccaccagtacgcctacgacggcaaggactacatcgccctgaaggaggacctgagaagctggaccgccgccgacatggccgcccagaccaccaagcacaagtgggaggccgcccacgtggccgagcagctgagagcctacctggagggcacctgcgtggagtggctgagaagatacctggagaacggcaaggagaccctgcagagaaccgacgcccccaagacccacatgacccaccacgccgtgagcgaccacgaggccaccctgagatgctgggccctgagcttctaccccgccgagatcaccctgacctggcagagagacggcgaggaccagacccaggacaccgagctggtggagaccagacccgccggcgacggcaccttccagaagtgggccgccgtggtggtgcccagcggccaggagcagagatacacctgccacgtgcagcacgagggcctgcccaagcccctgaccctgagatgggagcccagcagccagcccaccatccccatcgtgggcatcatcgccggcctggtgctgttcggcgccgtgatcaccggcgccgtggtggccgccgtgatgtggagaagaaagagcagcggcggcgagggcgtgaaggacagaaagggcggcagctacagccaggccgccagcagcgacagcgcccagggcagcgacgtgagcctgaccgcctgcaaggtgtag

SEQ ID NO: 345206 - DNA, 1098 bp, Artificial Sequence
  derived and/or modified sequence
atggccgtgatggcccccagaaccctggtgctgctgctgagcggcgccctggccctgacccagacctgggccggcagccacagcatgagatacttcttcaccagcgtgagcagacccggcagaggcgagcccagattcatcgccgtgggctacgtggacgacacccagttcgtgagattcgacagcgacgccgccagccagagaatggagcccagagccccctggatcgagcaggagggccccgagtactgggacggcgagaccagaaaggtgaaggcccacagccagacccacagagtggacctgggcaccctgagaggctactacaaccagagcgaggccggcagccacaccgtgcagagaatgtacggctgcgacgtgggcagcgactggagattcctgagaggctaccaccagtacgcctacgacggcaaggactacatcgccctgaaggaggacctgagaagctggaccgccgccgacatggccgcccagaccaccaagcacaagtgggaggccgcccacgtggccgagcagctgagagcctacctggagggcacctgcgtggagtggctgagaagatacctggagaacggcaaggagaccctgcagagaaccgacgcccccaagacccacatgacccaccacgccgtgagcgaccacgaggccaccctgagatgctgggccctgagcttctaccccgccgagatcaccctgacctggcagagagacggcgaggaccagacccaggacaccgagctggtggagaccagacccgccggcgacggcaccttccagaagtgggccgccgtggtggtgcccagcggccaggagcagagatacacctgccacgtgcagcacgagggcctgcccaagcccctgaccctgagatgggagcccagcagccagcccaccatccccatcgtgggcatcatcgccggcctggtgctgttcggcgccgtgatcaccggcgccgtggtggccgccgtgatgtggagaagaaagagcagcgacagaaagggcggcagctacagccaggccgccagcagcgacagcgcccagggcagcgacgtgagcctgaccgcctgcaaggtgtag

SEQ ID NO: 345207 - DNA, 1089 bp, Artificial Sequence
  derived and/or modified sequence
atggcccccagaaccctgctgctgctgctgagcggcgccctggccctgacccagacctgggccggcagccacagcatgagatacttcttcaccagcgtgagcagacccggcagaggcgagcccagattcatcgccgtgggctacgtggacgacacccagttcgtgagattcgacagcgacgccgccagccagagaatggagcccagagccccctggatcgagcaggagggccccgagtactgggacggcgagaccagaaaggtgaaggcccacagccagacccacagagtggacctgggcaccctgagaggctactacaaccagagcgaggccggcagccacaccgtgcagagaatgtacggctgcgacgtgggcagcgactggagattcctgagaggctaccaccagtacgcctacgacggcaaggactacatcgccctgaaggaggacctgagaagctggaccgccgccgacatggccgcccagaccaccaagcacaagtgggaggccgcccacgtggccgagcagctgagagcctacctggagggcacctgcgtggagtggctgagaagatacctggagaacggcaaggagaccctgcagagaaccgacgcccccaagacccacatgacccaccacgccgtgagcgaccacgaggccaccctgagatgctgggccctgagcttctaccccgccgagatcaccctgacctggcagagagacggcgaggaccagacccaggacaccgagctggtggagaccagacccgccggcgacggcaccttccagaagtgggccgccgtggtggtgcccagcggccaggagcagagatacacctgccacgtgcagcacgagggcctgcccaagcccctgaccctgagatgggagcccagcagccagcccaccatccccatcgtgggcatcatcgccggcctggtgctgttcggcgccgtgatcaccggcgccgtggtggccgccgtgatgtggagaagaaagagcagcgacagaaagggcggcagctacagccaggccgccagcagcgacagcgcccagggcagcgacgtgagcctgaccgcctgcaaggtgtag

SEQ ID NO: 345208 - DNA, 900 bp, Artificial Sequence
  derived and/or modified sequence
tgagccgtgatggctccccgcactctggtgctgttattaagcggcgcactggccctaactcaaacatgggcaggatcccatagtatgaggtatttcttcactagcgtctcaagacctgggcggggcgaaccccggtttatcgctgtgggttatgttgacgacacacagttcgtgcggttcgactcagacgcggcgtcccagcggatggagccgcgtgctccctggattgagcaggaggggcccgagtactgggatggggaaacacgcaaagtgaaggcgcatagtcagactcatcgggtggatttaggtacattaagaggctactacaaccagtctgaggccggatctcacaccgtgcagagaatgtacggatgcgacgtggggtccgactggaggtttctgcgtggctaccatcagtatgcgtatgatggcaaagactatatcgcattgaaagaggatctgcggagttggacagctgccgacatggctgcccagaccacgaaacacaagtgggaggccgcacacgtcgccgagcagctgagagcctacttggaaggaacctgcgtggaatggctcaggaggtatcttgagaacggcaaggaaacccttcaaagaaccgatgctcctaaaactcatatgacccaccatgccgtgtcagaccacgaggccaccctccgttgctgggccctaagcttctatcctgcggagatcacgttgacatggcagagggatggcgaggaccaaacccaggacacggagctcgtggaaacacgacctgcaggagatggaacatttcagaaatgggcagccgtggtcgtaccgtccggtcaagagcagcgctatacatgccatgtccagcacgagggacttcctaagcccctgactctgaggtgggtgtag

SEQ ID NO: 345209 - DNA, 1116 bp, Artificial Sequence
  derived and/or modified sequence
atggctgttatggctccccggacactggtcctgctcctgagcggcgcccttgctctgactcagacatgggccggctcccactccatgcggtactttttcacctcggtgagccgccctggccgcggggagccacgcttcatcgccgtgggctacgtggatgatacccagttcgtgcggtttgacagcgatgccgcctcacagaggatggaaccccgcgccccctggatcgagcaagagggccccgagtattgggacggcgagactagaaaagtcaaagcccattctcagacacaccgcgtagacctaggcacattgcgcgggtactataaccagagcgaagccgggagccacaccgtgcaacgaatgtacggctgcgacgttggctccgactggcgttttttacggggatatcaccagtatgcctatgacggcaaggactacatagcactcaaagaggatctaagatcgtggaccgccgcggatatggctgcccagacaaccaagcataaatgggaagctgcccacgtcgcagagcaactcagagcgtacttggagggcacgtgcgttgagtggctgagacgatacctggaaaacggtaaagagaccctccagcgtactgatgcaccgaaaactcacatgacgcatcatgccgtcagcgaccacgaggctactcttcggtgttgggcattgtccttctacccggcagaaattacactgacttggcaacgtgacggcgaagaccagacccaagacaccgagttagtggagaccagaccagctggagatggcacatttcagaaatgggccgcggtggtggtgccatctgggcaggaacagcggtacacctgtcatgtgcagcatgaggggcttccaaaacccctcaccctacgctgggaacctagtagtcagccaacaatccctattgttggcataatcgccggcctggtcctgtttggagccgtgatcaccggtgctgtagtggctgcagtaatgtggaggcgtaagtcgtccggtggcgagggagtcaaggaccgcaaggggggctcatactcacaggccgcaagttcagactcagctcagggcagcgacgtgagtctgactgcctgcaaagtctag

SEQ ID NO: 345210 - DNA, 1098 bp, Artificial Sequence
  derived and/or modified sequence
taggctgtcatggcgccgcggaccttagtacttttgttatctggagctctggccctcactcagacttgggctggctcacattcaatgcgctatttctttacctctgtgagtcggccagggagaggggagcctaggtttattgctgtaggctatgtggatgacactcagttcgtgagattcgattccgacgctgctagccaacggatggaacctagagcaccatggatagagcaggaggggccagaatattgggacggggagacccgaaaggtcaaagctcactcccagacgcatagagtggaccttggtacactccgtgggtattataaccagtctgaggctggcagccataccgttcagcgcatgtatgggtgtgacgttggcagtgattggagattcttgaggggataccaccagtacgcatatgacgggaaagactacatagctttaaaggaggacctacgatcttggacagctgctgatatggcagcccagaccaccaagcataagtgggaggccgcacacgtggctgagcagttgcgtgcctacctcgagggaacctgtgtggaatggctcagaagatacttggagaacggcaaggagacgctgcaaagaactgacgcccctaaaacccacatgacgcatcatgccgtgagcgaccacgaagctactctccgatgctgggccctgagcttctatcctgccgaaattaccctcacatggcagagagatggcgaagatcagacacaggacaccgagcttgtcgagaccaggccggctggggatggcactttccagaagtgggccgccgtcgtcgtaccaagtggacaggaacagaggtacacgtgtcacgtgcaacacgagggcctgccaaagcctctgactctgagatgggaacccagctcacagccaactattccgatcgtcggaattatcgcagggctcgtgttgttcggagccgtgatcactggagccgtagtggctgctgtaatgtggcggcgcaaatcgagtgacagaaagggggggagctactcccaggctgcttcttccgattccgcgcagggatcagacgtgtccctaactgcatgcaaagtttag

SEQ ID NO: 345211 - DNA, 900 bp, Artificial Sequence
  derived and/or modified sequence
atggctgtgatggcgccacgtacccttgtgctcttattaagtggggctctcgcccttactcaaacctgggcgggaagccactcaatgcgatatttttttacgtctgtgtcccgcccagggcgcggggagccccggttcattgcggttgggtatgtggacgacacccagttcgtccgattcgatagcgatgcagcttctcagaggatggaaccccgtgccccttggattgagcaggaggggcccgaatattgggacggcgagaccagaaaggttaaggctcattctcagactcatcgagtagacctcgggaccctcaggggatactacaatcagtcagaggccggcagccatactgtgcagagaatgtacggctgcgacgtgggttcggattggcggttcctgcgtgggtatcatcaatacgcctacgatggcaaagactatatcgcattgaaggaggatctaaggagctggaccgcggcagacatggcggcacagactacgaagcacaaatgggaggcggcccatgtagccgaacagctgagagcttatctggaggggacctgcgttgagtggctccgccggtatctcgaaaacggaaaagagacccttcaaagaacagacgccccaaagacacatatgacccaccacgcagtgagcgaccacgaagccactctgcgctgctgggcactgagcttttacccagcggagataacactgacctggcaaagggatggggaggaccaaacccaagacacagaactagtggaaacccgccccgccggggacggcactttccagaaatgggccgccgtggtggtgccgtctggacaggaacaacgctatacctgtcatgtacagcacgaaggattaccgaagcctctcacccttcgttgggtatag

SEQ ID NO: 345212 - DNA, 1116 bp, Artificial Sequence
  derived and/or modified sequence
tgagcagtcatggcaccccgcactctggtcttgctgctgtcaggagcactggccctcacccagacctgggctggaagtcattctatgaggtacttcttcacctcagtgagtcgacctggaaggggggaaccaagatttatcgcggtcggctacgtcgacgacactcagttcgtcagattcgacagtgatgcagcctcccagaggatggaaccaagggcaccctggatcgagcaggaaggacccgaatattgggatggagagacacggaaggtgaaggcacactctcaaacgcaccgcgtcgatttaggaactcttcgtggctattataaccagtccgaggctggtagtcacaccgtacagaggatgtacggatgcgacgtaggaagtgattggcgctttctaagaggctatcatcagtatgcatacgacggcaaggactatattgccctgaaagaggatctgcgttcctggactgccgccgatatggccgctcagaccaccaaacataaatgggaggctgcccacgtggccgagcaacttagagcctatctagagggaacatgtgtggagtggctacggcgctaccttgagaatggcaaagagacacttcaacgcaccgacgcccctaagacccatatgactcaccatgccgtgagcgatcatgaagccacacttcggtgttgggccctgtcgttctatcccgccgaaataaccctcacctggcagagggacggagaggaccagacccaggatactgagcttgtggaaacaagaccagcgggggacggcacattccagaaatgggccgctgtggtggttccatccggacaggagcagaggtacacctgccacgttcagcatgagggactgccaaaaccgctaaccctgcgctgggagccatcgtctcagcctacaatccccatagtgggcataatcgctggtctggttctatttggcgcagtgataaccggtgcggttgtggccgcagttatgtggcggcggaaaagctctggtggcgagggtgtgaaggataggaaaggggggtcttacagccaggcggcctcaagcgactcagcacaaggctccgacgtttcacttaccgcttgtaaggtgtag

SEQ ID NO: 345213 - DNA, 1098 bp, Artificial Sequence
  derived and/or modified sequence
atggccgtcatggctccacggactctggtgcttctgctgtcaggcgctttggctttgacacaaacatgggcgggctctcattctatgagatatttcttcacgtctgtgtctagaccaggccgcggggagccacgcttcatcgccgtgggatatgtggacgatacacagttcgtgcgcttcgactcggacgccgcgagccagagaatggaaccccgagctccttggatcgagcaagaaggaccggagtattgggacggggaaacccgcaaagtgaaggcccactctcagacccacagagttgaccttggcactcttcggggctactataatcagtctgaggcgggtagccataccgttcagagaatgtacggttgtgatgtggggtcagattggcggtttctcaggggttaccaccagtatgcctatgatggcaaagactacatcgcattaaaggaggacctgagatcctggaccgcagcagatatggccgctcagacaactaagcacaaatgggaggccgcccacgtagctgaacagctgagagcttacttggagggaacgtgcgtggagtggctccgccgatatctggaaaatggaaaggagacccttcagcgcacggatgctccaaagactcacatgactcatcacgctgtcagcgaccacgaggccacactacgatgttgggctctatccttttacccagccgaaattaccctcacctggcagcgggatggcgaggatcagacccaagataccgagctggttgagactagacctgccggcgatggcacttttcagaagtgggctgcggtggtcgtgccttccggccaagagcagcgctatacttgtcacgtccagcacgagggcctaccgaaacctttgactttacgctgggaaccctcctcccagccaacaatacctatcgtcggcatcatcgcaggcttggtcctattcggtgctgttattaccggcgccgtggtcgctgctgtgatgtggcgacggaagagtagcgatagaaagggcggatcctatagccaggcagcatcctctgacagtgcccaggggtcggatgtgtcattaaccgcgtgcaaggtctag

SEQ ID NO: 345214 - DNA, 1098 bp, Artificial Sequence
  derived and/or modified sequence
atggcagttatggcccctcgcaccctagtcttactgctctccggcgctttggccctgacacagacctgggccggcagccactcaatgcgctactttttcacctccgtgtcccggcctggacgcggtgaaccaaggtttatcgccgtggggtatgtggacgatacccaatttgtgagatttgacagcgacgcagcatctcagcgtatggagcctcgtgccccctggatcgaacaagagggacccgaatattgggatggcgagactcggaaggtaaaagcccattcacagacccaccgggtggacctggggacacttcgcgggtactacaaccagtcagaggcgggatctcataccgtgcaacgaatgtacggctgtgacgtgggaagtgattggcgtttcctgaggggttatcaccagtacgcctatgacggaaaagattatatagctctgaaggaggacttgaggtcatggacagctgcagacatggccgctcagactaccaaacataagtgggaggccgcccatgtggcagagcagttgcgcgcctacctggaaggtacctgcgtggagtggttgcggcgttaccttgagaacggcaaagagacgctccagcgcaccgacgcacccaaaacacatatgacacaccacgccgtgagcgatcatgaggccacgctgaggtgttgggcgctgagtttttatccagccgaaatcacattgacatggcagagagatggggaagaccagacacaagacaccgagctggtggagacacgccctgccggagatggcaccttccagaaatgggcagcagtggtggtcccctccgggcaggaacagagatacacttgtcatgtgcaacacgaaggtttgccaaagccgctgacactgaggtgggagcccagctctcaacccaccatccctatcgttgggatcattgcaggcttggtgctttttggagcggtgataactggagcagtggtggcagcagtgatgtggcgtcgaaagagctctgacaggaaaggcggctcttattcgcaggcggcctcttctgattccgctcaggggtccgacgtttccttgaccgcttgtaaggtctag

SEQ ID NO: 345215 - DNA, 1089 bp, Artificial Sequence
  derived and/or modified sequence
atggcccctagaacgctcctgctgttgctatccggagcacttgccctgacacagacctgggccgggagccatagcatgaggtatttcttcacaagcgtgagtagacctggacgaggagagcccaggtttattgctgtggggtatgtggatgacacacagtttgttcggtttgacagcgacgctgcctcacagcggatggaaccaagagctccgtggattgagcaggagggtcctgagtactgggacggcgaaactcgcaaagtgaaagcacatagccagactcacagggtcgacctgggcacactccggggttattacaatcaatctgaggccggaagccatactgtgcagaggatgtacggatgcgacgtgggcagcgactggcgatttcttcggggctatcaccagtatgcctacgacgggaaagattacatagccctgaaagaggatttgcgctcctggaccgccgccgatatggcagcccaaactacgaaacacaagtgggaggcggcacatgtggcggaacagttgcgggcttacctggagggaacttgcgttgagtggctgcggcgctatctggagaacggaaaagagacattgcagaggacggacgctccaaaaacccacatgactcatcatgcagtgagcgaccatgaagctaccctgcgctgttgggccctgtcattttatcctgccgagatcacacttacatggcagagggacggcgaggatcagactcaggacacagaactggttgagacacgcccagcgggtgatggaaccttccagaaatgggccgccgttgtggttccatccggacaggaacagagatacacctgtcacgtgcagcatgaaggactgcctaagccactcactcttcggtgggagcccagctcacagccaacaatccccatagtgggtatcatagctggactagtgctgtttggagcagtcataactggggccgttgtcgcagctgttatgtggcgacgcaagagctcagacagaaaaggcgggtcctactctcaggctgcctcttccgattctgcccagggtagcgatgtttctcttacagcctgcaaagtgtag

SEQ ID NO: 345216 - DNA, 1327 bp, Artificial Sequence
  derived and/or modified sequence
ggccgtcatggcgccccgaaccctcgtcctgctactctcgggggctctggccctgacccagacctgggcgggctctcactccatgaggtatttcttcacatccgtgtcccggcccggccgcggggagccccgcttcatcgcagtgggctacgtggacgacacgcagttcgtgcggttcgacagcgacgccgcgagccagaggatggagccgcgggcgccgtggatagagcaggagggtccggagtattgggacggggagacacggaaagtgaaggcccactcacagactcaccgagtggacctggggaccctgcgcggctactacaaccagagcgaggccggttctcacaccgtccagaggatgtatggctgcgacgtggggtcggactggcgcttcctccgcgggtaccaccagtacgcctacgacggcaaggattacatcgccctgaaagaggacctgcgctcttggaccgcggcggacatggcagctcagaccaccaagcacaagtgggaggcggcccatgtggcggagcagttgagagcctacctggagggcacgtgcgtggagtggctccgcagatacctggagaacgggaaggagacgctgcagcgcacggacgcccccaaaacgcatatgactcaccacgctgtctctgaccatgaagccaccctgaggtgctgggccctgagcttctaccctgcggagatcacactgacctggcagcgggatggggaggaccagacccaggacacggagctcgtggagaccaggcctgcaggggatggaaccttccagaagtgggcggctgtggtggtgccttctggacaggagcagagatacacctgccatgtgcagcatgagggtttgcccaagcccctcaccctgagatgggtgtgagacagctgccttgtgtgggactgagaggcaagagttgttcctgcccttccctttgtgacttgaagaaccctgactttgtttctgcaaaggcacctgcatgtgtctgtgttcgtgtaggcataatgtgaggaggtggggagaccaccccacccccatgtccaccatgaccctcttcccacgctgacctgtgctccctccccaatcatctttcctgttccagagaggtggggctgaggtgtctccatctctgtctcaacttcatggtgcactgagctgtaacttcttccttccctattaaaattagaacctgagtataaatttactttctcaaattcttgccatgagaggttgatgagttaattaaaggagaagattcctaaaatttgagagacaaaataaatggaacacatgagaaccttccagagtcca

SEQ ID NO: 345217 - DNA, 1854 bp, Artificial Sequence
  derived and/or modified sequence
cgcttggcacagaagcagaggggtcagggcgaagtcccagggccccaggcgtggctctcagggtctcaggccccgaaggcggtgtatggattggggagtcccagccttggggattccccaactccgcagtttcttttctccctctcccaacctatgtagggtccttcttcctggatactcacgacgcggacccagttctcactcccattgggtgtcgggtttccagagaagccaatcagtgtcgtcgcggtcgcggttctaaagtccgcacgcacccaccgggactcagattctccccagacgccgaggatggccgtcatggcgccccgaaccctcgtcctgctactctcgggggctctggccctgacccagacctgggcgggctctcactccatgaggtatttcttcacatccgtgtcccggcccggccgcggggagccccgcttcatcgcagtgggctacgtggacgacacgcagttcgtgcggttcgacagcgacgccgcgagccagaggatggagccgcgggcgccgtggatagagcaggagggtccggagtattgggacggggagacacggaaagtgaaggcccactcacagactcaccgagtggacctggggaccctgcgcggctactacaaccagagcgaggccggttctcacaccgtccagaggatgtatggctgcgacgtggggtcggactggcgcttcctccgcgggtaccaccagtacgcctacgacggcaaggattacatcgccctgaaagaggacctgcgctcttggaccgcggcggacatggcagctcagaccaccaagcacaagtgggaggcggcccatgtggcggagcagttgagagcctacctggagggcacgtgcgtggagtggctccgcagatacctggagaacgggaaggagacgctgcagcgcacggacgcccccaaaacgcatatgactcaccacgctgtctctgaccatgaagccaccctgaggtgctgggccctgagcttctaccctgcggagatcacactgacctggcagcgggatggggaggaccagacccaggacacggagctcgtggagaccaggcctgcaggggatggaaccttccagaagtgggcggctgtggtggtgccttctggacaggagcagagatacacctgccatgtgcagcatgagggtttgcccaagcccctcaccctgagatgggagccgtcttcccagcccaccatccccatcgtgggcatcattgctggcctggttctctttggagctgtgatcactggagctgtggtcgctgctgtgatgtggaggaggaagagctcaggtggggaaggggtgaaggatagaaaaggagggagctactctcaggctgcaagcagtgacagtgcccagggctctgatgtgtctctcacagcttgtaaagtgtgagacagctgccttgtgtgggactgagaggcaagagttgttcctgcccttccctttgtgacttgaagaaccctgactttgtttctgcaaaggcacctgcatgtgtctgtgttcgtgtaggcataatgtgaggaggtggggagaccaccccacccccatgtccaccatgaccctcttcccacgctgacctgtgctccctccccaatcatctttcctgttccagagaggtggggctgaggtgtctccatctctgtctcaacttcatggtgcactgagctgtaacttcttccttccctattaaaattagaacctgagtataaatttactttctcaaattcttgccatgagaggttgatgagttaattaaaggagaagattcctaaaatttgagagacaaaataaatggaacacatgagaaccttccagagtcca

SEQ ID NO: 345218 - DNA, 1525 bp, Artificial Sequence
  derived and/or modified sequence
ggccgtcatggcgccccgaaccctcgtcctgctactctcgggggctctggccctgacccagacctgggcgggctctcactccatgaggtatttcttcacatccgtgtcccggcccggccgcggggagccccgcttcatcgcagtgggctacgtggacgacacgcagttcgtgcggttcgacagcgacgccgcgagccagaggatggagccgcgggcgccgtggatagagcaggagggtccggagtattgggacggggagacacggaaagtgaaggcccactcacagactcaccgagtggacctggggaccctgcgcggctactacaaccagagcgaggccggttctcacaccgtccagaggatgtatggctgcgacgtggggtcggactggcgcttcctccgcgggtaccaccagtacgcctacgacggcaaggattacatcgccctgaaagaggacctgcgctcttggaccgcggcggacatggcagctcagaccaccaagcacaagtgggaggcggcccatgtggcggagcagttgagagcctacctggagggcacgtgcgtggagtggctccgcagatacctggagaacgggaaggagacgctgcagcgcacggacgcccccaaaacgcatatgactcaccacgctgtctctgaccatgaagccaccctgaggtgctgggccctgagcttctaccctgcggagatcacactgacctggcagcgggatggggaggaccagacccaggacacggagctcgtggagaccaggcctgcaggggatggaaccttccagaagtgggcggctgtggtggtgccttctggacaggagcagagatacacctgccatgtgcagcatgagggtttgcccaagcccctcaccctgagatgggagccgtcttcccagcccaccatccccatcgtgggcatcattgctggcctggttctctttggagctgtgatcactggagctgtggtcgctgctgtgatgtggaggaggaagagctcagatagaaaaggagggagctactctcaggctgcaagcagtgacagtgcccagggctctgatgtgtctctcacagcttgtaaagtgtgagacagctgccttgtgtgggactgagaggcaagagttgttcctgcccttccctttgtgacttgaagaaccctgactttgtttctgcaaaggcacctgcatgtgtctgtgttcgtgtaggcataatgtgaggaggtggggagaccaccccacccccatgtccaccatgaccctcttcccacgctgacctgtgctccctccccaatcatctttcctgttccagagaggtggggctgaggtgtctccatctctgtctcaacttcatggtgcactgagctgtaacttcttccttccctattaaaattagaacctgagtataaatttactttctcaaattcttgccatgagaggttgatgagttaattaaaggagaagattcctaaaatttgagagacaaaataaatggaacacatgagaaccttccagagtcca

SEQ ID NO: 345219 - DNA, 1334 bp, Artificial Sequence
  derived and/or modified sequence
cgaggatggccgtcatggcgccccgaaccctcgtcctgctactctcgggggctctggccctgacccagacctgggcgggctctcactccatgaggtatttcttcacatccgtgtcccggcccggccgcggggagccccgcttcatcgcagtgggctacgtggacgacacgcagttcgtgcggttcgacagcgacgccgcgagccagaggatggagccgcgggcgccgtggatagagcaggagggtccggagtattgggacggggagacacggaaagtgaaggcccactcacagactcaccgagtggacctggggaccctgcgcggctactacaaccagagcgaggccggttctcacaccgtccagaggatgtatggctgcgacgtggggtcggactggcgcttcctccgcgggtaccaccagtacgcctacgacggcaaggattacatcgccctgaaagaggacctgcgctcttggaccgcggcggacatggcagctcagaccaccaagcacaagtgggaggcggcccatgtggcggagcagttgagagcctacctggagggcacgtgcgtggagtggctccgcagatacctggagaacgggaaggagacgctgcagcgcacggacgcccccaaaacgcatatgactcaccacgctgtctctgaccatgaagccaccctgaggtgctgggccctgagcttctaccctgcggagatcacactgacctggcagcgggatggggaggaccagacccaggacacggagctcgtggagaccaggcctgcaggggatggaaccttccagaagtgggcggctgtggtggtgccttctggacaggagcagagatacacctgccatgtgcagcatgagggtttgcccaagcccctcaccctgagatgggtgtgagacagctgccttgtgtgggactgagaggcaagagttgttcctgcccttccctttgtgacttgaagaaccctgactttgtttctgcaaaggcacctgcatgtgtctgtgttcgtgtaggcataatgtgaggaggtggggagaccaccccacccccatgtccaccatgaccctcttcccacgctgacctgtgctccctccccaatcatctttcctgttccagagaggtggggctgaggtgtctccatctctgtctcaacttcatggtgcactgagctgtaacttcttccttccctattaaaattagaacctgagtataaatttactttctcaaattcttgccatgagaggttgatgagttaattaaaggagaagattcctaaaatttgagagacaaaataaatggaacacatgagaaccttccagagtcca

SEQ ID NO: 345220 - DNA, 1543 bp, Artificial Sequence
  derived and/or modified sequence
ggccgtcatggcgccccgaaccctcgtcctgctactctcgggggctctggccctgacccagacctgggcgggctctcactccatgaggtatttcttcacatccgtgtcccggcccggccgcggggagccccgcttcatcgcagtgggctacgtggacgacacgcagttcgtgcggttcgacagcgacgccgcgagccagaggatggagccgcgggcgccgtggatagagcaggagggtccggagtattgggacggggagacacggaaagtgaaggcccactcacagactcaccgagtggacctggggaccctgcgcggctactacaaccagagcgaggccggttctcacaccgtccagaggatgtatggctgcgacgtggggtcggactggcgcttcctccgcgggtaccaccagtacgcctacgacggcaaggattacatcgccctgaaagaggacctgcgctcttggaccgcggcggacatggcagctcagaccaccaagcacaagtgggaggcggcccatgtggcggagcagttgagagcctacctggagggcacgtgcgtggagtggctccgcagatacctggagaacgggaaggagacgctgcagcgcacggacgcccccaaaacgcatatgactcaccacgctgtctctgaccatgaagccaccctgaggtgctgggccctgagcttctaccctgcggagatcacactgacctggcagcgggatggggaggaccagacccaggacacggagctcgtggagaccaggcctgcaggggatggaaccttccagaagtgggcggctgtggtggtgccttctggacaggagcagagatacacctgccatgtgcagcatgagggtttgcccaagcccctcaccctgagatgggagccgtcttcccagcccaccatccccatcgtgggcatcattgctggcctggttctctttggagctgtgatcactggagctgtggtcgctgctgtgatgtggaggaggaagagctcaggtggggaaggggtgaaggatagaaaaggagggagctactctcaggctgcaagcagtgacagtgcccagggctctgatgtgtctctcacagcttgtaaagtgtgagacagctgccttgtgtgggactgagaggcaagagttgttcctgcccttccctttgtgacttgaagaaccctgactttgtttctgcaaaggcacctgcatgtgtctgtgttcgtgtaggcataatgtgaggaggtggggagaccaccccacccccatgtccaccatgaccctcttcccacgctgacctgtgctccctccccaatcatctttcctgttccagagaggtggggctgaggtgtctccatctctgtctcaacttcatggtgcactgagctgtaacttcttccttccctattaaaattagaacctgagtataaatttactttctcaaattcttgccatgagaggttgatgagttaattaaaggagaagattcctaaaatttgagagacaaaataaatggaacacatgagaaccttccagagtcca

SEQ ID NO: 345221 - DNA, 1868 bp, Artificial Sequence
  derived and/or modified sequence
aaggggacaggagggcctgaaggatgagaaggacggagggaagggctggagaagcaggaggcgcaactcttcccgattaaaaacaaaaacaacaacaacaaaaatctacacctccattcccagagcaagcttactctctggcaccaaactccatgggatgatttttcttctagaagagtccaggtggacagggtccttcttcctggatactcacgacgcggacccagttctcactcccattgggtgtcgggtttccagagaagccaatcagtgtcgtcgcggtcgcggttctaaagtccgcacgcacccaccgggactcagattctccccagacgccgaggatggccgtcatggcgccccgaaccctcgtcctgctactctcgggggctctggccctgacccagacctgggcgggctctcactccatgaggtatttcttcacatccgtgtcccggcccggccgcggggagccccgcttcatcgcagtgggctacgtggacgacacgcagttcgtgcggttcgacagcgacgccgcgagccagaggatggagccgcgggcgccgtggatagagcaggagggtccggagtattgggacggggagacacggaaagtgaaggcccactcacagactcaccgagtggacctggggaccctgcgcggctactacaaccagagcgaggccggttctcacaccgtccagaggatgtatggctgcgacgtggggtcggactggcgcttcctccgcgggtaccaccagtacgcctacgacggcaaggattacatcgccctgaaagaggacctgcgctcttggaccgcggcggacatggcagctcagaccaccaagcacaagtgggaggcggcccatgtggcggagcagttgagagcctacctggagggcacgtgcgtggagtggctccgcagatacctggagaacgggaaggagacgctgcagcgcacggacgcccccaaaacgcatatgactcaccacgctgtctctgaccatgaagccaccctgaggtgctgggccctgagcttctaccctgcggagatcacactgacctggcagcgggatggggaggaccagacccaggacacggagctcgtggagaccaggcctgcaggggatggaaccttccagaagtgggcggctgtggtggtgccttctggacaggagcagagatacacctgccatgtgcagcatgagggtttgcccaagcccctcaccctgagatgggagccgtcttcccagcccaccatccccatcgtgggcatcattgctggcctggttctctttggagctgtgatcactggagctgtggtcgctgctgtgatgtggaggaggaagagctcagatagaaaaggagggagctactctcaggctgcaagcagtgacagtgcccagggctctgatgtgtctctcacagcttgtaaagtgtgagacagctgccttgtgtgggactgagaggcaagagttgttcctgcccttccctttgtgacttgaagaaccctgactttgtttctgcaaaggcacctgcatgtgtctgtgttcgtgtaggcataatgtgaggaggtggggagaccaccccacccccatgtccaccatgaccctcttcccacgctgacctgtgctccctccccaatcatctttcctgttccagagaggtggggctgaggtgtctccatctctgtctcaacttcatggtgcactgagctgtaacttcttccttccctattaaaattagaacctgagtataaatttactttctcaaattcttgccatgagaggttgatgagttaattaaaggagaagattcctaaaatttgagagacaaaataaatggaacacatgagaaccttccagagtcca

SEQ ID NO: 345222 - DNA, 1533 bp, Artificial Sequence
  derived and/or modified sequence
agattctccccagacgccgaggatggccgtcatggcgccccgaaccctcgtcctgctactctcgggggctctggccctgacccagacctgggcgggctctcactccatgaggtatttcttcacatccgtgtcccggcccggccgcggggagccccgcttcatcgcagtgggctacgtggacgacacgcagttcgtgcggttcgacagcgacgccgcgagccagaggatggagccgcgggcgccgtggatagagcaggagggtccggagtattgggacggggagacacggaaagtgaaggcccactcacagactcaccgagtggacctggggaccctgcgcggctactacaaccagagcgaggccggttctcacaccgtccagaggatgtatggctgcgacgtggggtcggactggcgcttcctccgcgggtaccaccagtacgcctacgacggcaaggattacatcgccctgaaagaggacctgcgctcttggaccgcggcggacatggcagctcagaccaccaagcacaagtgggaggcggcccatgtggcggagcagttgagagcctacctggagggcacgtgcgtggagtggctccgcagatacctggagaacgggaaggagacgctgcagcgcacggacgcccccaaaacgcatatgactcaccacgctgtctctgaccatgaagccaccctgaggtgctgggccctgagcttctaccctgcggagatcacactgacctggcagcgggatggggaggaccagacccaggacacggagctcgtggagaccaggcctgcaggggatggaaccttccagaagtgggcggctgtggtggtgccttctggacaggagcagagatacacctgccatgtgcagcatgagggtttgcccaagcccctcaccctgagatgggagccgtcttcccagcccaccatccccatcgtgggcatcattgctggcctggttctctttggagctgtgatcactggagctgtggtcgctgctgtgatgtggaggaggaagagctcagatagaaaaggagggagctactctcaggctgcaagcagtgacagtgcccagggctctgatgtgtctctcacagcttgtaaagtgtgagacagctgccttgtgtgggactgagaggcaagagttgttcctgcccttccctttgtgacttgaagaaccctgactttgtttctgcaaaggcacctgcatgtgtctgtgttcgtgtaggcataatgtgaggaggtggggagaccaccccacccccatgtccaccatgaccctcttcccacgctgacctgtgctccctccccaatcatctttcctgttccagagaggtggggctgaggtgtctccatctctgtctcaacttcatggtgcactgagctgtaacttcttccttccctattaaaattagaacctgagtataaatttactttctcaaattcttgccatgagaggttgatgagttaattaaaggagaagattcctaaaatttgagagacaaaataaatggaacacatgag

SEQ ID NO: 345223 - DNA, 1533 bp, Artificial Sequence
  derived and/or modified sequence
agattctccccagacgccgaggatggtgctcatggcgccccgaaccctcctcctgctactctcgggggctctggccctgacccagacctgggcgggctctcactccatgaggtatttcttcacatccgtgtcccggcccggccgcggggagccccgcttcatcgcagtgggctacgtggacgacacgcagttcgtgcggttcgacagcgacgccgcgagccagaggatggagccgcgggcgccgtggatagagcaggagggtccggagtattgggacggggagacacggaaagtgaaggcccactcacagactcaccgagtggacctggggaccctgcgcggctactacaaccagagcgaggccggttctcacaccgtccagaggatgtatggctgcgacgtggggtcggactggcgcttcctccgcgggtaccaccagtacgcctacgacggcaaggattacatcgccctgaaagaggacctgcgctcttggaccgcggcggacatggcagctcagaccaccaagcacaagtgggaggcggcccatgtggcggagcagttgagagcctacctggagggcacgtgcgtggagtggctccgcagatacctggagaacgggaaggagacgctgcagcgcacggacgcccccaaaacgcatatgactcaccacgctgtctctgaccatgaagccaccctgaggtgctgggccctgagcttctaccctgcggagatcacactgacctggcagcgggatggggaggaccagacccaggacacggagctcgtggagaccaggcctgcaggggatggaaccttccagaagtgggcggctgtggtggtgccttctggacaggagcagagatacacctgccatgtgcagcatgagggtttgcccaagcccctcaccctgagatgggagccgtcttcccagcccaccatccccatcgtgggcatcattgctggcctggttctctttggagctgtgatcactggagctgtggtcgctgctgtgatgtggaggaggaagagctcagatagaaaaggagggagctactctcaggctgcaagcagtgacagtgcccagggctctgatgtgtctctcacagcttgtaaagtgtgagacagctgccttgtgtgggactgagaggcaagagttgttcctgcccttccctttgtgacttgaagaaccctgactttgtttctgcaaaggcacctgcatgtgtctgtgttcgtgtaggcataatgtgaggaggtggggagaccaccccacccccatgtccaccatgaccctcttcccacgctgacctgtgctccctccccaatcatctttcctgttccagagaggtggggctgaggtgtctccatctctgtctcaacttcatggtgcactgagctgtaacttcttccttccctattaaaattagaacctgagtataaatttactttctcaaattcttgccatgagaggttgatgagttaattaaaggagaagattcctaaaatttgagagacaaaataaatggaacacatgag

SEQ ID NO: 345224 - DNA, 900 bp, Artificial Sequence
  derived and/or modified sequence
tgagctgtgatggcccccaggaccctggtgctgctgctgagcggggccctggccctgacccagacctgggccggcagccacagcatgagatacttcttcacctctgtgtccaggcctggccgcggggagccccgcttcatcgctgtgggctacgtggatgacacccagtttgtgcgctttgacagtgatgctgccagccagaggatggagccccgggccccctggattgagcaggagggccctgagtactgggatggagagaccaggaaggtgaaggcccacagccagacccaccgggtggacctgggcaccctgcggggctactacaaccagagcgaggccggcagccacacagtgcagaggatgtatggctgtgatgtgggcagtgactggaggttcctgcggggctaccaccagtatgcctatgatggcaaggactacatcgccctgaaggaggacctgcgctcctggacagctgctgacatggccgcccagaccaccaagcacaagtgggaggccgcccacgtggccgagcagctgcgggcctacctggagggcacctgtgtggagtggctgcggcgctacctggagaatggcaaggagaccctgcagaggacagatgcccccaagacccacatgacccaccacgctgtgtctgaccacgaggccaccctgcgctgctgggccctgtccttctacccagctgagatcaccctgacctggcagagagatggagaggaccagacccaggacacagagctggtggagaccaggcctgctggagatggcaccttccagaagtgggccgctgtggtggtgcccagcggccaggagcagcgctacacctgccacgtgcagcacgagggcctgcccaagcccctgaccctgcgctgggtgtag

SEQ ID NO: 345225 - DNA, 1116 bp, Artificial Sequence
  derived and/or modified sequence
atggctgtgatggcccccaggaccctggtgctgctgctgagcggggccctggccctgacccagacctgggccggcagccacagcatgagatacttcttcacctctgtgtccaggcctggccgcggggagccccgcttcatcgctgtgggctacgtggatgacacccagtttgtgcgctttgacagtgatgctgccagccagaggatggagccccgggccccctggattgagcaggagggccctgagtactgggatggagagaccaggaaggtgaaggcccacagccagacccaccgggtggacctgggcaccctgcggggctactacaaccagagcgaggccggcagccacacagtgcagaggatgtatggctgtgatgtgggcagtgactggaggttcctgcggggctaccaccagtatgcctatgatggcaaggactacatcgccctgaaggaggacctgcgctcctggacagctgctgacatggccgcccagaccaccaagcacaagtgggaggccgcccacgtggccgagcagctgcgggcctacctggagggcacctgtgtggagtggctgcggcgctacctggagaatggcaaggagaccctgcagaggacagatgcccccaagacccacatgacccaccacgctgtgtctgaccacgaggccaccctgcgctgctgggccctgtccttctacccagctgagatcaccctgacctggcagagagatggagaggaccagacccaggacacagagctggtggagaccaggcctgctggagatggcaccttccagaagtgggccgctgtggtggtgcccagcggccaggagcagcgctacacctgccacgtgcagcacgagggcctgcccaagcccctgaccctgcgctgggagcccagcagccagcccaccatccccatcgtgggcatcatcgccggcctggtgctgtttggagctgtgatcactggagctgtggtggccgctgtgatgtggaggaggaagagcagtggaggagaaggagtgaaggacaggaagggcggcagctacagccaggccgccagcagtgacagcgcccagggcagtgatgtgtccctgacagcctgcaaggtgtag

SEQ ID NO: 345226 - DNA, 1098 bp, Artificial Sequence
  derived and/or modified sequence
tgagctgtgatggcccccaggaccctggtgctgctgctgagcggggccctggccctgacccagacctgggccggcagccacagcatgagatacttcttcacctctgtgtccaggcctggccgcggggagccccgcttcatcgctgtgggctacgtggatgacacccagtttgtgcgctttgacagtgatgctgccagccagaggatggagccccgggccccctggattgagcaggagggccctgagtactgggatggagagaccaggaaggtgaaggcccacagccagacccaccgggtggacctgggcaccctgcggggctactacaaccagagcgaggccggcagccacacagtgcagaggatgtatggctgtgatgtgggcagtgactggaggttcctgcggggctaccaccagtatgcctatgatggcaaggactacatcgccctgaaggaggacctgcgctcctggacagctgctgacatggccgcccagaccaccaagcacaagtgggaggccgcccacgtggccgagcagctgcgggcctacctggagggcacctgtgtggagtggctgcggcgctacctggagaatggcaaggagaccctgcagaggacagatgcccccaagacccacatgacccaccacgctgtgtctgaccacgaggccaccctgcgctgctgggccctgtccttctacccagctgagatcaccctgacctggcagagagatggagaggaccagacccaggacacagagctggtggagaccaggcctgctggagatggcaccttccagaagtgggccgctgtggtggtgcccagcggccaggagcagcgctacacctgccacgtgcagcacgagggcctgcccaagcccctgaccctgcgctgggagcccagcagccagcccaccatccccatcgtgggcatcatcgccggcctggtgctgtttggagctgtgatcactggagctgtggtggccgctgtgatgtggaggaggaagagcagtgacaggaagggcggcagctacagccaggccgccagcagtgacagcgcccagggcagtgatgtgtccctgacagcctgcaaggtgtag

SEQ ID NO: 345227 - DNA, 900 bp, Artificial Sequence
  derived and/or modified sequence
atggctgtgatggcccccaggaccctggtgctgctgctgagcggggccctggccctgacccagacctgggccggcagccacagcatgagatacttcttcacctctgtgtccaggcctggccgcggggagccccgcttcatcgctgtgggctacgtggatgacacccagtttgtgcgctttgacagtgatgctgccagccagaggatggagccccgggccccctggattgagcaggagggccctgagtactgggatggagagaccaggaaggtgaaggcccacagccagacccaccgggtggacctgggcaccctgcggggctactacaaccagagcgaggccggcagccacacagtgcagaggatgtatggctgtgatgtgggcagtgactggaggttcctgcggggctaccaccagtatgcctatgatggcaaggactacatcgccctgaaggaggacctgcgctcctggacagctgctgacatggccgcccagaccaccaagcacaagtgggaggccgcccacgtggccgagcagctgcgggcctacctggagggcacctgtgtggagtggctgcggcgctacctggagaatggcaaggagaccctgcagaggacagatgcccccaagacccacatgacccaccacgctgtgtctgaccacgaggccaccctgcgctgctgggccctgtccttctacccagctgagatcaccctgacctggcagagagatggagaggaccagacccaggacacagagctggtggagaccaggcctgctggagatggcaccttccagaagtgggccgctgtggtggtgcccagcggccaggagcagcgctacacctgccacgtgcagcacgagggcctgcccaagcccctgaccctgcgctgggtgtag

SEQ ID NO: 345228 - DNA, 1116 bp, Artificial Sequence
  derived and/or modified sequence
tgagctgtgatggcccccaggaccctggtgctgctgctgagcggggccctggccctgacccagacctgggccggcagccacagcatgagatacttcttcacctctgtgtccaggcctggccgcggggagccccgcttcatcgctgtgggctacgtggatgacacccagtttgtgcgctttgacagtgatgctgccagccagaggatggagccccgggccccctggattgagcaggagggccctgagtactgggatggagagaccaggaaggtgaaggcccacagccagacccaccgggtggacctgggcaccctgcggggctactacaaccagagcgaggccggcagccacacagtgcagaggatgtatggctgtgatgtgggcagtgactggaggttcctgcggggctaccaccagtatgcctatgatggcaaggactacatcgccctgaaggaggacctgcgctcctggacagctgctgacatggccgcccagaccaccaagcacaagtgggaggccgcccacgtggccgagcagctgcgggcctacctggagggcacctgtgtggagtggctgcggcgctacctggagaatggcaaggagaccctgcagaggacagatgcccccaagacccacatgacccaccacgctgtgtctgaccacgaggccaccctgcgctgctgggccctgtccttctacccagctgagatcaccctgacctggcagagagatggagaggaccagacccaggacacagagctggtggagaccaggcctgctggagatggcaccttccagaagtgggccgctgtggtggtgcccagcggccaggagcagcgctacacctgccacgtgcagcacgagggcctgcccaagcccctgaccctgcgctgggagcccagcagccagcccaccatccccatcgtgggcatcatcgccggcctggtgctgtttggagctgtgatcactggagctgtggtggccgctgtgatgtggaggaggaagagcagtggaggagaaggagtgaaggacaggaagggcggcagctacagccaggccgccagcagtgacagcgcccagggcagtgatgtgtccctgacagcctgcaaggtgtag

SEQ ID NO: 345229 - DNA, 1098 bp, Artificial Sequence
  derived and/or modified sequence
atggctgtgatggcccccaggaccctggtgctgctgctgagcggggccctggccctgacccagacctgggccggcagccacagcatgagatacttcttcacctctgtgtccaggcctggccgcggggagccccgcttcatcgctgtgggctacgtggatgacacccagtttgtgcgctttgacagtgatgctgccagccagaggatggagccccgggccccctggattgagcaggagggccctgagtactgggatggagagaccaggaaggtgaaggcccacagccagacccaccgggtggacctgggcaccctgcggggctactacaaccagagcgaggccggcagccacacagtgcagaggatgtatggctgtgatgtgggcagtgactggaggttcctgcggggctaccaccagtatgcctatgatggcaaggactacatcgccctgaaggaggacctgcgctcctggacagctgctgacatggccgcccagaccaccaagcacaagtgggaggccgcccacgtggccgagcagctgcgggcctacctggagggcacctgtgtggagtggctgcggcgctacctggagaatggcaaggagaccctgcagaggacagatgcccccaagacccacatgacccaccacgctgtgtctgaccacgaggccaccctgcgctgctgggccctgtccttctacccagctgagatcaccctgacctggcagagagatggagaggaccagacccaggacacagagctggtggagaccaggcctgctggagatggcaccttccagaagtgggccgctgtggtggtgcccagcggccaggagcagcgctacacctgccacgtgcagcacgagggcctgcccaagcccctgaccctgcgctgggagcccagcagccagcccaccatccccatcgtgggcatcatcgccggcctggtgctgtttggagctgtgatcactggagctgtggtggccgctgtgatgtggaggaggaagagcagtgacaggaagggcggcagctacagccaggccgccagcagtgacagcgcccagggcagtgatgtgtccctgacagcctgcaaggtgtag

SEQ ID NO: 345230 - DNA, 1089 bp, Artificial Sequence
  derived and/or modified sequence
atggcccccaggaccctgctgctgctgctgagcggggccctggccctgacccagacctgggccggcagccacagcatgagatacttcttcacctctgtgtcccggcccggccgcggggagccccgcttcatcgctgtgggctacgtggatgacacccagtttgtgcgctttgacagtgatgctgccagccagaggatggagccccgggccccctggattgagcaggagggccctgagtactgggatggagagaccaggaaggtgaaggcccacagccagacccaccgggtggacctgggcaccctgcggggctactacaaccagagcgaggccggcagccacacagtgcagaggatgtatggctgtgatgtgggcagtgactggaggttcctgcggggctaccaccagtatgcctatgatggcaaggactacatcgccctgaaggaggacctgcgctcctggacagctgctgacatggccgcccagaccaccaagcacaagtgggaggccgcccacgtggccgagcagctgcgggcctacctggagggcacctgtgtggagtggctgcggcgctacctggagaatggcaaggagaccctgcagaggacagatgcccccaagacccacatgacccaccacgctgtgtctgaccacgaggccaccctgcgctgctgggccctgtccttctacccagctgagatcaccctgacctggcagagagatggagaggaccagacccaggacacagagctggtggagaccaggcctgctggagatggcaccttccagaagtgggccgctgtggtggtgcccagcggccaggagcagcgctacacctgccacgtgcagcacgagggcctgcccaagcccctgaccctgcgctgggagcccagcagccagcccaccatccccatcgtgggcatcatcgccggcctggtgctgtttggagctgtgatcaccggggctgtggtggccgctgtgatgtggaggaggaagagcagtgacagaaaaggaggcagctacagccaggccgccagcagtgacagcgcccagggcagtgatgtgtccctgacagcctgcaaggtgtag

SEQ ID NO: 345231 - DNA, 900 bp, Artificial Sequence
  derived and/or modified sequence
tgagccgtgatggccccccggaccctggtgctgctgctgagcggcgctctcgcccttactcagacatgggcaggaagtcacagcatgagatacttctttacctctgtgagccgaccgggcaggggggaaccccgcttcattgcggtagggtatgtggacgatacacagtttgtccgttttgacagtgatgccgcctcacagaggatggagccaagggctccttggatcgagcaggaaggacctgagtactgggatggagagaccagaaaagtgaaggcccacagccagacccaccgagtcgacctggggaccctccgaggatattataaccagtctgaggctggctctcacacagttcagagaatgtacggctgcgacgtgggctcagactggagatttctcagaggatatcaccagtacgcctatgacggtaaagactatattgccctcaaggaagaccttcggagttggaccgccgccgacatggcagcacaaacaacgaaacacaagtgggaagcagctcacgtggcagagcagcttcgggcatacttggagggaacctgtgtggagtggctcaggcggtacttagagaatggcaaggagacattacagcggaccgacgctccaaaaactcacatgacgcatcatgccgtaagcgaccatgaggccaccttaagatgctgggcgctgtccttttacccggcagagataacacttacatggcagcgggatggtgaagatcagacccaggataccgagctggtggagacaagacccgctggtgatgggacgtttcagaagtgggcggctgtggtggtgccgtccggacaggaacagcgatatacctgccacgtgcagcacgaaggccttcccaaacctcttacactcaggtgggtgtag

SEQ ID NO: 345232 - DNA, 1116 bp, Artificial Sequence
  derived and/or modified sequence
atggccgtgatggccccccggaccctggtgctgctgctgagcggcgccctggctcttactcagacttgggccggctctcacagcatgagatacttctttacatctgtgtccaggcctgggaggggcgaacccagatttattgcagttggatacgtcgacgatactcagtttgtgcgctttgactcagacgctgcaagtcagaggatggaacctcgcgcaccatggattgagcaggaaggcccagagtattgggacggagaaacccgcaaagtgaaagcccatagtcaaacccacagagttgatctaggtaccctacgtgggtactacaatcagtccgaagccggctcccataccgtgcagcgcatgtacggatgtgacgttggatcggactggcgcttcttgcgcggttaccaccagtatgcatacgatggtaaagattacatcgcattgaaggaggacctgagatcgtggacagcggccgatatggccgcccagacaactaagcacaagtgggaggcggctcatgtggccgagcagctgagggcttatctggaaggcacatgcgtggaatggctgcggaggtacctcgaaaatggaaaggaaaccctgcagcggaccgatgcccccaagacccacatgacccatcatgcggtttctgaccacgaggccacactgcgttgctgggccctttccttctaccctgccgaaatcactcttacctggcagagggatggtgaggatcaaacgcaagatacagaactggtcgagaccaggcctgctggagacggtacatttcaaaaatgggcggctgtggtagtgcctagtggacaggaacaacgatacacatgtcatgttcagcacgagggcttgcccaagccattgaccctccggtgggagccatcaagtcagcccaccattccaatagtcgggattatcgctggcctagtactgtttggggcagtgattactggcgcagtggttgctgcggtgatgtggcgacggaaatctagcggcggcgaaggagtgaaagataggaagggggggtcctacagccaggccgcgagttccgactctgctcagggaagcgatgtttctctcacagcttgcaaagtttag

SEQ ID NO: 345233 - DNA, 1098 bp, Artificial Sequence
  derived and/or modified sequence
tgagccgtgatggccccccggaccctggtgctgctgctgagcggcgcactggcgttgacacagacttgggctggctctcactccatgcgctatttttttacctctgtcagtagacctggcaggggagagcctcgattcatcgcggttggatacgtcgatgacacacaatttgtgcggtttgatagtgatgctgcgtcacagcgaatggaacctcgggctccctggattgaacaggagggtcccgagtactgggacggcgaaactagaaaggtaaaggcccactcacagacacaccgtgttgacctgggcactctgcgtggctattataaccagtcagaggcaggctctcacaccgtccaacggatgtatgggtgcgatgtcggctctgactggcgattcctcagaggttatcaccagtatgcatatgacggcaaggactacatcgctctgaaggaagaccttcgctcgtggacagccgcggacatggccgctcaaactaccaaacataagtgggaagcagctcacgttgcggagcagctcagggcctacctggaagggacttgtgtcgagtggttaagaagatatttagaaaatggaaaagagaccctgcagcgcactgatgcccccaaaacccacatgactcaccacgctgttagcgatcacgaggccactcttcggtgctgggccctcagtttttatcctgcagagatcactttgacttggcagagagatggggaggatcagacccaggataccgagctggtagagacccgccccgccggcgacggaacatttcagaagtgggccgccgtggtagttccgagcggccaggagcagcgatacacttgccacgtgcagcacgagggcctgcccaaaccgctaaccttgcgttgggaaccctctagtcagcctacaatcccaattgtaggcatcattgcgggccttgtactattcggcgccgtaattaccggggcggtcgttgccgcagtgatgtggcggcgcaagagtagtgaccgtaaaggtggtagttatagccaggctgcttccagcgactccgcccaaggatctgatgttagtctgactgcttgcaaagtgtag

SEQ ID NO: 345234 - DNA, 900 bp, Artificial Sequence
  derived and/or modified sequence
atggccgtgatggccccccggaccctggtgctgctgctgagcggcgcgctcgccctgacacaaacatgggcggggtctcatagcatgagatacttttttacttctgtgagccggccgggtaggggggagccccggttcattgctgttggctatgtagatgacactcagttcgtgagatttgacagtgatgctgctagccagagaatggaacctagagctccgtggatagagcaggagggtcccgagtattgggatggcgaaacccggaaggtcaaagcccacagccagacacacagagttgacttggggactctcagggggtactacaaccagagcgaagccggctcgcataccgtgcagaggatgtacggatgcgatgttggctcggattggcgttttctgagaggctatcatcaatatgcctacgacgggaaagactatatagcacttaaggaggatcttcgttcttggacggccgccgacatggcagcacagactaccaaacacaagtgggaggcggcccacgtagccgagcagctgagagcctacctagagggcacctgcgtagagtggttgcgaagatatttggagaatggtaaagaaaccctccagcgaacggacgcaccaaaaacccatatgactcaccacgcagtgtccgaccacgaggcgaccctgagatgttgggctctttccttctaccccgctgagatcacactcacatggcagcgagatggcgaggaccagacccaggataccgaactggtggaaacccggcctgcaggggacggtacattccagaaatgggccgcggtcgttgttccttccgggcaagaacaacgctatacctgtcatgttcagcatgagggtctccccaaacctctcaccctgcggtgggtatag

SEQ ID NO: 345235 - DNA, 1116 bp, Artificial Sequence
  derived and/or modified sequence
tgagccgtgatggccccccggaccctggtgctgctgctgagcggcgcgcttgcactcacccagacttgggcaggcagtcactccatgagatacttttttacttccgtaagtcggcctggcagaggggagccccggtttatcgctgtggggtacgttgatgacactcaattcgtgcgctttgattcagatgccgcttcgcagcggatggagccccgcgccccctggatcgaacaggaagggccagagtattgggacggtgagacccgaaaggtgaaagcccactcccaaactcacagggtggatctgggtactttgcggggatattacaatcagtccgaggcagggtctcataccgtccaaaggatgtatggatgtgacgttggtagcgattggcgtttcctgagaggataccatcagtatgcttatgacggcaaggattacattgctctgaaggaggatcttagaagctggactgctgctgacatggctgcacagactacaaaacacaaatgggaagcagcacatgtggcagagcagctcagagcatacctagagggaacatgcgttgaatggcttcggcgctatttggaaaacggtaaagaaacccttcaacgaacggacgcacccaaaacacacatgactcaccatgcggtcagtgatcatgaagctaccctccgctgctgggctctaagtttttatcccgccgaaataacactgacatggcagagggatggcgaagaccagacacaggacacagagctggttgagactcggccagccggggacggcacttttcagaagtgggccgccgtggtggtgccctcagggcaggagcagcgctatacctgtcatgtgcagcatgagggcttacctaaacctttaactctcagatgggagccaagtagccagccgaccatacctatcgtgggtattattgcaggcctcgtgttgttcggagccgtaattacgggagccgttgtggcagctgtgatgtggagaaggaagtcatcagggggggaaggtgtcaaggatcgaaaaggcgggtcctactctcaggccgcctcttcggatagcgcccagggtagcgacgtgtctcttacagcttgtaaagtttag

SEQ ID NO: 345236 - DNA, 1098 bp, Artificial Sequence
  derived and/or modified sequence
atggccgtgatggccccccggaccctggtgctgctgctgagcggcgcgttagcgctcacccagacatgggcgggctcccactccatgagatacttcttcacatccgtgagtcgtcccggacggggtgaaccaagattcattgctgtgggatacgtcgatgacactcaattcgtccgattcgactctgacgccgcctcccagcggatggaaccgcgggctccatggattgaacaggaggggccagagtactgggatggggagacaaggaaggttaaggcccactcacagacccatagggtggatttaggaacactgcgcggttattacaaccagagcgaggctggcagtcatacagtgcagcggatgtatggctgtgatgttggttccgactggagatttctgagggggtatcaccagtacgcctacgacggaaaggactacattgctttaaaggaggacctgcggtcctggacagcagccgacatggccgcccaaactaccaaacacaaatgggaagccgcccacgtcgcagagcagctgcgagcctatctggaaggcacctgcgttgagtggctgcgtcggtacctggagaacgggaaggagactcttcagcggaccgacgctcccaaaacccacatgacacatcacgccgtgtccgaccacgaggccacactgcgttgttgggccctgtctttctatcctgctgagattacattgacatggcagcgcgatggagaggatcaaacgcaggatacggaactggtagaaactcgacctgccggcgacgggaccttccaaaaatgggccgctgtggtggtgccttctggtcaggaacagcgatacacatgtcatgtccagcacgaggggttgccaaaacccctgacactgcggtgggagccttcctcccagcccacaatcccaattgttgggatcattgcaggcctagtgttattcggtgctgttatcaccggagctgtggtcgcagccgtaatgtggcggaggaagtcttcggatagaaaggggggatcctactcacaggcagcctccagcgactcggctcagggcagcgacgtcagcctcacggcttgtaaggtctag

SEQ ID NO: 345237 - DNA, 1098 bp, Artificial Sequence
  derived and/or modified sequence
atggccgtgatggccccccggaccctggtgctgctgctgagcggcgcgctcgccctcacacagacctgggccgggtctcatagtatgcggtactttttcacatcagtatcaaggcctgggcgtggagagcctcggttcattgcagtgggttacgtcgatgatacgcagtttgtgaggttcgacagtgacgccgcttctcagcggatggaacctagagctccctggatcgaacaggagggtcctgagtactgggacggcgagacgcggaaagttaaagctcattctcagacccacagagtggacctaggaacccttcgcggttattataatcagtctgaagctggcagccacaccgtgcaacggatgtatgggtgtgacgtaggctccgactggcggttcttacgcggctatcatcaatatgcctatgatggcaaggactacatcgccttaaaggaagacctgcgatcatggacagctgcagacatggcagcgcagaccaccaaacataagtgggaggccgctcatgtggcggaacagttgcgagcataccttgagggcacatgtgtggagtggctgaggagatacctcgagaacggtaaggaaaccctgcaacggactgatgccccaaagacgcacatgacacatcacgcagtgagcgaccatgaagcaacgctgcggtgctgggccctgtctttctatccagctgaaatcactttgacatggcaacgcgatggcgaggatcaaacacaggataccgagctggtcgagactcgtcccgccggagatgggacctttcagaaatgggccgctgtggtcgtgccaagtgggcaggaacaaaggtacacatgccatgtgcagcatgaggggctgcctaagcctctgacactaagatgggagccatcctcccaacccactatccctattgtcggaatcattgcaggtctcgtgctgttcggtgccgtgattacaggagccgttgtagctgccgtgatgtggcgcaggaaatcttctgacagaaaaggtgggagttacagccaggccgcgtcatccgactctgcacagggctccgacgtgtccctgaccgcgtgtaaggtttag

SEQ ID NO: 345238 - DNA, 1089 bp, Artificial Sequence
  derived and/or modified sequence
atggccccccggaccctgctgctgctgctgagcggcgccctggccctgacccaaacctgggcaggctcccattcgatgagatatttttttacctctgtttcgcgccccgggcgaggagaaccacgcttcatcgccgtaggctacgtggacgacacccaattcgtcaggttcgatagtgacgctgcctctcagaggatggagcctagggctccctggattgaacaggagggaccagagtactgggatggggaaacacggaaggtgaaggcccatagccaaacccacagagtcgatcttggtacgctccgtggttactataaccaatccgaggccggtagtcacaccgttcagcgcatgtacggatgcgacgtgggcagtgactggcgcttcttgcgcggataccaccagtatgcttacgatggcaaagactacatcgccctgaaagaggaccttcgaagctggactgctgccgacatggccgcacaaacaacaaagcacaagtgggaggctgcccacgtagctgaacagcttagggcatatctcgaggggacctgcgtggaatggttgcgacggtacttggaaaatggaaaggagactctgcagagaaccgatgcaccaaagactcatatgacccatcatgctgtcagcgaccatgaagcaaccctgagatgctgggctctcagcttctatcccgccgagattactctcacatggcagagagatggagaggaccagacccaggataccgagctcgtcgagactcgcccggccggtgatggcacctttcaaaagtgggcagctgtcgtggtgccctccggacaggagcagcgatatacatgtcacgtccagcacgaaggtcttccaaaaccacttactttaaggtgggagccctcgagtcaaccaaccatccctatcgtaggcataattgcaggacttgtattgttcggagctgtaatcaccggcgccgtcgtggctgccgtcatgtggagaagaaaatcctctgaccgaaagggaggttcttacagtcaggccgccagctcagattctgcccaggggtccgatgtgagtttgaccgcctgcaaagtttag

SEQ ID NO: 345239 - DNA, 900 bp, Artificial Sequence
  derived and/or modified sequence
tgagccgtcatggccccaagaaccctcgtgctactactatctggcgctctcgcactgactcaaacttgggccggttcacactcgatgcgatattttttcacaagtgtcagccggccaggtaggggcgagcctaggttcattgctgtggggtacgtagacgacacccagttcgttcggttcgatagcgacgccgctagccagcggatggagccaagggcaccatggatcgagcaagagggtccagaatactgggatggtgaaacccggaaagtgaaggcccattcgcagacacaccgagtggacttagggacgctcagaggctactacaatcagagtgaggctggctcccacaccgttcagcggatgtacggatgcgatgtgggaagtgattggcggtttctccggggttaccatcaatatgcctacgatggtaaagactacatagctctgaaggaggacttaagaagctggacagccgcagatatggcggcacagacaactaaacacaagtgggaggctgcccatgtggctgagcagctacgcgcttacttagagggaacatgtgtggaatggctacggagatacctggaaaacggcaaggagacactgcagcgcaccgatgctcccaaaacccacatgactcaccacgcagtgagtgaccatgaagccactcttagatgttgggcgctgtcgttttacccagcggagattactctcacttggcagagagacggtgaagaccaaacccaggacacagagctagtggaaaccaggccagccggagacggtactttccagaaatgggcggctgttgtggttcccagtggccaagagcagaggtacacatgccacgtgcaacacgagggactaccaaagccccttaccctgaggtgggtctag

SEQ ID NO: 345240 - DNA, 1116 bp, Artificial Sequence
  derived and/or modified sequence
atggcagtaatggctcctaggactctggttctgttactgagtggtgccctggccctcacacagacttgggcaggatcacattctatgagatactttttcacctccgtaagtaggcccggtcgcggagagccgaggttcatagcggtgggctatgtagacgacacacagttcgtgaggttcgacagcgacgccgcatcccaaaggatggaacccagggctccttggatcgagcaggagggacccgaatattgggacggtgagaccaggaaagtgaaagctcattcccagacacaccgggtggacttgggaacactgagaggttactacaaccagtctgaggccggttctcatacggtgcagaggatgtacgggtgtgatgtaggctctgattggcggttcctgcgcggataccatcagtatgcatacgatggcaaggactacatcgctctcaaagaggacctcaggagctggacggccgctgatatggccgctcagacaaccaaacacaagtgggaggctgctcacgttgcagagcaactgcgggcttatctggagggtacttgtgtggaatggctgagaagatatttagagaacggaaaagagaccctgcagcgtaccgacgcgccaaagacacatatgacccatcacgccgtgagtgatcacgaagctaccctgagatgctgggcactctccttctacccggcagagataacgctgacttggcagcgagatggtgaagaccaaacccaggacactgagttggtggaaactcgtcctgcgggagacgggaccttccagaagtgggccgcagtggtcgtcccaagtggccaagagcagagatatacctgccacgtccagcacgaaggactgccaaaaccactgacgctccgatgggagccatcatcccagccgaccatccctattgttggaattattgcgggactggtactctttggggcagtgatcaccggggcagtggtagctgcagtcatgtggagaaggaaatcgtcaggtggcgagggcgtgaaggatcgaaagggaggttcttactcccaggccgcatcctccgactccgcccaggggtccgacgtgtcccttaccgcctgcaaagtatag

SEQ ID NO: 345241 - DNA, 1098 bp, Artificial Sequence
  derived and/or modified sequence
taagcagtgatggcccctcggaccctggtgctgcttctgtccggggctctggcactgacccaaacatgggccggatctcactccatgaggtacttctttacaagcgtgtctcggcctggcagaggggaaccaaggttcatcgcagtaggttatgttgacgatacacagtttgtgaggtttgactccgacgctgctagtcagaggatggagccacgggctccatggatcgagcaggaggggcctgagtactgggatggagaaactaggaaggtgaaggcacacagccagacccaccgggtagacctagggacactgcggggatattacaaccaatccgaggccggatcccataccgtgcaacgaatgtatggctgtgatgtcggttccgattggcggttcctgcgcggataccatcaatacgcctatgacgggaaagattacatcgcgctcaaggaggacctgaggagctggacagcagctgacatggctgcacaaacgaccaagcataagtgggaggctgcccacgtagcggaacagctgagagcatatctcgagggaacctgcgtggaatggctgcggcgatatctggagaatggtaaagagacccttcagcgaaccgatgccccaaagacccacatgactcaccacgctgtgtcagatcatgaggcgacgctacggtgttgggctctgagcttttatccagctgaaataacgcttacgtggcagcgggacggagaggatcagacgcaagacacggagctggtggagacacgccctgcgggagatggcacatttcagaaatgggccgctgtcgtggtgccttctgggcaggagcaacggtatacatgtcacgtacaacacgaggggctgcctaagccactgacactccgctgggaaccttcttctcagccaactattcctattgtcggcattattgccggtttggtcttgtttggggcagttatcacaggggcagtggtggccgctgtcatgtggcggcgaaagtctagtgatcggaagggtggctcctacagtcaggcggcttcttctgattcagcccaagggtccgacgtgtctctaacagcctgtaaggtctag

SEQ ID NO: 345242 - DNA, 900 bp, Artificial Sequence
  derived and/or modified sequence
atggctgtgatggccccacgcacactggttcttttgctgagtggagcattggcattgactcagacctgggctggctctcacagcatgagatacttttttacaagtgtctcccggcctgggaggggagagccccgattcatcgccgttggctacgtggatgacacacagttcgtgagattcgacagcgatgcagcttctcaacggatggaacctcgtgccccttggatcgaacaggaaggtcccgagtattgggatggcgagacccggaaggtgaaggctcacagccagacacaccgcgtggacttggggaccctgcgcggatactataaccagtcagaggcagggtctcacacagtccaaaggatgtacgggtgcgacgtcggctctgactggagattcctgcgcggttaccatcagtacgcttacgacggtaaggattatatcgccttgaaggaggatctgcgcagttggacagccgcagacatggcggctcaaaccacaaagcacaaatgggaggccgctcatgtcgccgagcaacttcgcgcttacctcgaagggacatgcgtggaatggctaagaaggtacctggagaatggtaaggaaaccctccagcgaacagatgctccaaaaacccatatgactcaccacgccgtgtccgaccacgaagctactcttaggtgttgggccctgtctttctaccctgccgagataacactgacatggcagagggacggggaggatcagacacaggacaccgaactggtggagaccaggcctgcaggggacggaacctttcagaaatgggccgctgtggtcgtgcctagcggtcaggagcagcgctacacctgccatgttcagcacgaaggcctgcccaagcccctaacattaagatgggtttag

SEQ ID NO: 345243 - DNA, 1116 bp, Artificial Sequence
  derived and/or modified sequence
tgagcagtcatggctcccagaactctcgtgttattgttatcaggggcactggccctgacacaaacttgggctgggtcacactctatgaggtacttttttacctcagtgtctcgacctggtaggggcgagccccgttttatcgccgtgggttacgtcgacgatacacagtttgtgaggtttgattctgatgctgcatcccagcggatggagcccagagccccttggatcgagcaggaaggaccagagtactgggatggtgaaacccgaaaagtgaaagcccactctcagactcatcgggtggacctgggaacattgcgaggatattataatcagtcagaagccggaagtcatactgtgcagagaatgtatggctgtgacgttggttccgattggcgatttttacggggatatcatcagtacgcctatgacggcaaggactacattgcgctgaaggaggatctccggtcctggaccgctgctgatatggctgctcaaaccacaaaacataaatgggaggctgcccatgtggcagagcagctgagagcatacttagaaggcacctgtgtggagtggctgcgccgatacctcgaaaatggtaaggaaaccttacagaggaccgatgcaccaaagactcacatgactcatcatgccgtgtccgatcacgaagccactctgcggtgctgggctttatcattttaccctgcggagatcacattaacgtggcagcgggacggcgaggatcagacccaggacacagagctcgttgaaacaagacctgccggtgacggaaccttccagaagtgggccgcagtcgtcgtgccgtcagggcaagagcagagatatacttgccacgtgcaacatgaaggactcccaaagcccctcacattacggtgggagccaagttcgcagcccacaatccctattgtgggaataatcgcgggactggtactgtttggtgccgtcatcaccggggctgtggtcgccgcagtgatgtggaggcgcaaaagctccgggggtgagggcgtgaaagaccgcaagggcggaagctactctcaggccgcatcctctgactcagcacaggggtccgatgtctccttgaccgcctgtaaggtgtag

SEQ ID NO: 345244 - DNA, 1098 bp, Artificial Sequence
  derived and/or modified sequence
atggctgtcatggcaccaagaactctggtgctgttgctttctggggcactggccctcacacagacatgggcgggtagccacagtatgagatatttttttacttcagtttctagaccaggacgaggggagccgagattcatcgcagtgggctatgtggacgatacccagttcgtgcgcttcgacagtgacgctgcttcgcagcggatggaacccagagccccttggatcgagcaggaagggccagagtactgggacggcgaaacccgaaaagtaaaagctcacagccagacccaccgagtggatcttggaacactgagggggtactataatcagtcagaggctggatctcacaccgtgcagagaatgtacggctgcgatgtaggatccgactggcgctttctgcgcggttaccatcaatacgcatatgacggcaaggattatattgcgctcaaggaagacttgcggagttggacagccgctgatatggccgcacagacaactaagcataaatgggaagccgctcatgtagctgagcaactgcgcgcttacctggaagggacatgtgtggaatggttgcgacgatacctggaaaatggcaaggagacgctgcagaggaccgatgccccaaagacgcacatgacccaccacgccgtatctgatcacgaggccacgctccgctgttgggcgctgagcttttatcccgcagaaataacattgacttggcagcgcgacggagaggaccagactcaggacactgaacttgtcgaaaccaggcctgcgggtgatggtacattccaaaagtgggctgccgtggtggtgccttcggggcaggagcagaggtacacatgccacgtgcaacatgaaggtttaccgaagccacttacacttaggtgggagccatctagccagcccactatccctattgtaggaataattgcagggttggttttatttggtgcggtgattactggggcagttgttgctgccgtgatgtggcgtagaaaatcttctgatcggaaaggaggctcttacagtcaggcggcttcttctgattccgcacagggctctgacgtctcactcactgcttgcaaggtgtag

SEQ ID NO: 345245 - DNA, 1098 bp, Artificial Sequence
  derived and/or modified sequence
atggcagtaatggccccacgtacgcttgttctcctgttgtccggtgctttggctctgacgcagacttgggctgggtctcactccatgagatattttttcacatcggtctcacggcctggccgaggcgaacctagattcattgccgtgggctacgttgatgatacacagtttgtcaggtttgacagtgacgctgcatcccaacgaatggagcccagagcaccctggattgagcaggagggaccagaatattgggatggcgagactcgcaaggtgaaagcccacagccagacacatcgagtggatcttggaaccctccggggttactacaatcagtccgaggccggatcccatactgtacagcggatgtatgggtgcgacgtcggaagcgattggcggtttctcaggggctatcaccagtatgcatacgacggaaaggattatatagccctaaaagaggatctgagatcctggaccgcagcggatatggccgctcaaacaaccaaacataaatgggaagctgcgcacgtggctgagcagctccgcgcatatctggaagggacctgtgtggagtggctgcgcaggtatctggaaaacggcaaggagacccttcaacggacagacgcccctaagacccatatgacacaccatgcggtgtcggaccacgaggctacactgcgttgctgggcgttgtctttctatccagcggagataaccttgacgtggcagcgggacggagaggatcagacgcaggatactgagctggttgagactcgtccagccggagacggcaccttccagaagtgggccgcagtcgttgtgccgtctggtcaggagcagaggtacacgtgccacgtacagcacgaagggttaccaaagccattgactctcaggtgggagccatcttctcagcctacaatacccattgtgggtattattgccggtctcgtgctctttggagcagtgattaccggcgctgtggtcgcagccgtgatgtggcgcaggaagtcctcagataggaaggggggaagctactcccaagccgcatcgtccgactctgcccaaggttctgatgtttctttgaccgcctgcaaggtgtag

SEQ ID NO: 345246 - DNA, 1089 bp, Artificial Sequence
  derived and/or modified sequence
atggctcctagaactttattgctgcttctcagcggggctctcgctttgacgcagacctgggccggatcccacagtatgagatatttctttacgtccgtgagtcggcctgggagaggagagccccgatttatagccgttgggtatgttgacgacacccagtttgttcgattcgactctgatgctgcatcccaacggatggagccgcgtgccccatggattgagcaggaaggaccagaatattgggatggggaaacacgtaaagtcaaagcacactcccagacccaccgcgtcgacctcgggacactgcggggatattataatcaaagcgaggccggatcccacaccgttcagagaatgtacgggtgtgacgtagggtcagactggaggtttcttcgcggatatcatcagtatgcatatgacgggaaagactatattgccctgaaggaagacttaaggtcctggaccgcagccgatatggctgcccagacgacaaaacacaagtgggaagccgctcacgtagccgagcaactgagggcctatcttgaaggtacttgcgttgaatggctgaggcgctacctggaaaatgggaaagagactctgcaaagaaccgacgctcctaagacccacatgacacatcacgccgtatccgaccacgaagccaccctcaggtgttgggctttatctttttacccagcagaaattacgctcacgtggcaacgagacggcgaggaccagacacaggatacggaactcgtagagaccaggcccgcaggggatggcacattccagaaatgggccgctgtggtcgtcccctcagggcaggagcagaggtatacttgtcatgttcagcatgaagggctgccaaaacctctcaccctccgctgggagccctctagccagcccacaatccccatcgtggggataatcgccggactcgtgctctttggagcagtgattactggcgctgttgttgctgcagttatgtggcgcaggaaatcctccgacaggaagggtgggagctactcccaggccgcatcttcagatagtgcccagggctccgatgtgtcccttaccgcgtgtaaagtatag

SEQ ID NO: 345247 - protein, 362 aa, Artificial Sequence
  derived and/or modified sequence
MRVTAPRTLLLLLWGAVALTETWAGSHSMRYFHTSVSRPGRGEPRFISVGYVDGTQFVRFDSDAASPRTEPRAPWIEQEGPEYWDRNTQISKTNTQTYRESLRNLRGYYNQSEAGSHTLQRMYGCDVGPDGRLLRGHDQSAYDGKDYIALNEDLSSWTAADTAAQITQRKWEAARVAEQLRAYLEGTCVEWLRRHLENGKETLQRADPPKTHVTHHPISDHEATLRCWALGFYPAEITLTWQRDGEDQTQDTELVETRPAGDRTFQKWAAVVVPSGEEQRYTCHVQHEGLPKPLTLRWEPSSQSTIPIVGIVAGLAVLAVVVIGAVVATVMCRRKSSGGKGGSYSQAASSDSAQGSDVSLTA

SEQ ID NO: 345248 - protein, 224 aa, Artificial Sequence
  derived and/or modified sequence
MRVTAPRTLLLLLWGAVALTETWAGSHSMRYFHTSVSRPGRGEPRFISVGYVDGTQFVRFDSDAASPRTEPRAPWIEQEGPEYWDRNTQISKTNTQTYRESLRNLRGYYNQSEAGSHTLQRMYGCDVGPDGRLLRGHDQSAYDGKDYIALNEDLSSWTAADTAAQITQRKWEAARVAEQLRAYLEGTCVEWLRRHLENGKETLQRADQEQKSLFPAQRLELSNE

SEQ ID NO: 345249 - protein, 261 aa, Artificial Sequence
  derived and/or modified sequence
  misc_feature (1)..(1): Xaa can be any naturally occurring amino acid
XRVMAPRTLILLLSGALALTETWAGSHSMRYFYTAVSRPGRGEPHFIAVGYVDDTQFVRFDSDAASPRGEPRAPWVEQEGPEYWDRETQKYKRQAQTDRVSLRNLRGYYNQSEAGSHIIQRMYGCDVGPDGRLLRGYDQYAYDGKDYIALNEDLRSWTAADTAAQITQRKWEAAREAEQLRAYLEGLCVEWLRRYLKNGKETLQRAEHPKTHVTHHPVSDHEASRRWNLPEVGSCGGAFWRRAEIHVPCAARGAAGAPHPE

SEQ ID NO: 345250 - protein, 326 aa, Artificial Sequence
  derived and/or modified sequence
MRVMAPRTLILLLSGALALTETWACSHSMRYFYTAVSRPGRGEPRFIAVGYVDDTQFVRFDSDAASPRGEPRAPWVEQEGPEYWDRETQKYKRQAQTDRVSLRNLRGYYNQSEAGSHTLQWMYGCDLGPDGRLLRGYDQSAYDGKDYIALNEDLRSWTAADTAAQITQRKWEAARAAEQQRAYLEGTCVEWLRRYLENGKETLQRAEHPKTHVTHHLVSDHEATLRCWALGFYPAEITLTWQRDGEDQTQDTELVETRPAGDGTFQKWAAVVVPSGEEQRYTCHVQHEGLPEPLTLRWGGKGGSCSQAASSNSAQGSDESLIACKA

SEQ ID NO: 345251 - DNA, 1089 bp, Artificial Sequence
  derived and/or modified sequence
atgagagtgaccgcccccagaaccctgctgctgctgctgtggggcgccgtggccctgaccgagacctgggccggcagccacagcatgagatacttccacaccagcgtgagcagacccggcagaggcgagcccagattcatcagcgtgggctacgtggacggcacccagttcgtgagattcgacagcgacgccgccagccccagaaccgagcccagagccccctggatcgagcaggagggccccgagtactgggacagaaacacccagatcagcaagaccaacacccagacctacagagagagcctgagaaacctgagaggctactacaaccagagcgaggccggcagccacaccctgcagagaatgtacggctgcgacgtgggccccgacggcagactgctgagaggccacgaccagagcgcctacgacggcaaggactacatcgccctgaacgaggacctgagcagctggaccgccgccgacaccgccgcccagatcacccagagaaagtgggaggccgccagagtggccgagcagctgagagcctacctggagggcacctgcgtggagtggctgagaagacacctggagaacggcaaggagaccctgcagagagccgacccccccaagacccacgtgacccaccaccccatcagcgaccacgaggccaccctgagatgctgggccctgggcttctaccccgccgagatcaccctgacctggcagagagacggcgaggaccagacccaggacaccgagctggtggagaccagacccgccggcgacagaaccttccagaagtgggccgccgtggtggtgcccagcggcgaggagcagagatacacctgccacgtgcagcacgagggcctgcccaagcccctgaccctgagatgggagcccagcagccagagcaccatccccatcgtgggcatcgtggccggcctggccgtgctggccgtggtggtgatcggcgccgtggtggccaccgtgatgtgcagaagaaagagcagcggcggcaagggcggcagctacagccaggccgccagcagcgacagcgcccagggcagcgacgtgagcctgaccgcctag

SEQ ID NO: 345252 - DNA, 675 bp, Artificial Sequence
  derived and/or modified sequence
atgagagtgaccgcccccagaaccctgctgctgctgctgtggggcgccgtggccctgaccgagacctgggccggcagccacagcatgagatacttccacaccagcgtgagcagacccggcagaggcgagcccagattcatcagcgtgggctacgtggacggcacccagttcgtgagattcgacagcgacgccgccagccccagaaccgagcccagagccccctggatcgagcaggagggccccgagtactgggacagaaacacccagatcagcaagaccaacacccagacctacagagagagcctgagaaacctgagaggctactacaaccagagcgaggccggcagccacaccctgcagagaatgtacggctgcgacgtgggccccgacggcagactgctgagaggccacgaccagagcgcctacgacggcaaggactacatcgccctgaacgaggacctgagcagctggaccgccgccgacaccgccgcccagatcacccagagaaagtgggaggccgccagagtggccgagcagctgagagcctacctggagggcacctgcgtggagtggctgagaagacacctggagaacggcaaggagaccctgcagagagccgaccaggagcagaagagcctgttccccgcccagagactggagctgagcaacgagtag

SEQ ID NO: 345253 - DNA, 1089 bp, Artificial Sequence
  derived and/or modified sequence
atgcgcgtaacagcgcctagaaccctccttctcttgttatggggggccgtggcattgacagagacatgggcgggatcccatagcatgcgatacttccacacgtcggtgtcaaggccaggtagaggtgagccacgttttatctctgtcggctacgtggacggcacccaatttgtgcggtttgattcggacgctgcctcgccacgcaccgagccacgcgcaccttggattgagcaggaaggtccagagtattgggatcggaacacccagatcagcaagaccaacacccaaacttatagggagtctctcagaaatctgaggggctattacaatcaatccgaagccggctcccacaccctgcagcgtatgtacgggtgtgacgtgggcccagacggtcgtttactgcgcggccacgatcaaagtgcgtacgacgggaaggactatatcgctcttaatgaagacctctcatcatggaccgcagctgataccgctgcccagataacccagcggaaatgggaggccgccagagtagctgaacagcttcgcgcatatttagaagggacttgcgtggaatggttgcgcaggcatctagagaacggaaaggaaaccctgcagcgcgcagatccccccaagacgcacgtgactcatcaccccatttcagatcatgaggcgaccttaaggtgctgggcattaggtttttatcctgctgaaattaccctcacctggcagagggatggtgaagaccagacccaggatacggaactagtcgaaaccagaccagcaggagaccggacatttcaaaagtgggccgcagtggtcgtaccctcgggcgaggagcagcgctatacttgccatgtgcagcacgaaggactgcccaaaccacttacattgcggtgggagccaagctctcagtcaactattcccatcgtggggatcgtcgcggggctagcagtattggccgtggtagtcatcggcgcagtggtggccactgtgatgtgtaggcggaagagcagtggcgggaaggggggatcttactcccaggccgcttcaagcgacagtgcacagggcagtgatgtgagccttacggcgtag

SEQ ID NO: 345254 - DNA, 675 bp, Artificial Sequence
  derived and/or modified sequence
atgcgtgtcaccgcaccacgcacactgcttctgctactttggggcgccgtcgccctgacagagacttgggccggatcacactctatgcgctattttcatacttcagtgtctaggcccggaagaggagaaccacgatttatctcagttgggtatgtggatggaactcagttcgtgcgcttcgactcagatgccgccagtcctcggactgaaccccgggcgccctggattgagcaggagggaccagagtactgggacagaaatacacaaatctctaagactaacacccaaacgtatagggaatcccttcgaaacctccgggggtactacaaccagagcgaagccgggagccacacccttcagcgaatgtacggatgcgacgtaggacccgacgggagactgcttagggggcacgaccaatcagcgtatgacggcaaggactatatcgcattgaatgaggacttgtcttcttggactgccgctgataccgctgcccagattacacagcggaaatgggaggcagccagagttgcggaacagctgagagcttatctggaggggacttgcgtggagtggctgcgcagacacttagaaaacggtaaggagacactgcagagagccgatcaggagcagaaaagtctattccccgcccagaggctggaattatctaatgagtag

SEQ ID NO: 345255 - DNA, 1561 bp, Artificial Sequence
  derived and/or modified sequence
ccccacgcacccacccggactcagaatctcctcagacgccgagatgcgggtcacggcgccccgaaccctcctcctgctgctctggggggcagtggccctgaccgagacctgggctggctcccactccatgaggtatttccacacctccgtgtcccggcccggccgcggggagccccgcttcatctcagtgggctacgtggacggcacccagttcgtgaggttcgacagcgacgccgcgagtccgaggacggagccccgggcgccgtggatagagcaagaggggccggagtattgggaccggaacacacagatctccaagaccaacacacagacttaccgagagagcctgcggaacctgcgcggctactacaaccagagcgaggccgggtctcacaccctccagaggatgtacggctgcgacgtggggccggacgggcgcctcctccgcgggcatgaccagtccgcctacgacggcaaggattacatcgccctgaacgaggacctgagctcctggaccgcggcggacaccgcggctcagatcacccagcgcaagtgggaggcggcccgtgtggcggagcagctgagagcctacctggagggcacgtgcgtggagtggctccgcagacacctggagaacgggaaggagacgctgcagcgcgcggaccccccaaagacacatgtgacccaccaccccatctctgaccatgaggccaccctgaggtgctgggccctgggcttctaccctgcggagatcacactgacctggcagcgggatggcgaggaccaaactcaggacaccgagcttgtggagaccagaccagcaggagatagaaccttccagaagtgggcagctgtggtggtgccttctggagaagagcagagatacacatgccatgtacagcatgaggggctgccgaagcccctcaccctgagatgggagccatcttcccagtccaccatccccatcgtgggcattgttgctggcctggctgtcctagcagttgtggtcatcggagctgtggtcgctactgtgatgtgtaggaggaagagctcaggtggaaaaggagggagctactctcaggctgcgtccagcgacagtgcccagggctctgatgtgtctctcacagcttgaaaagcctgagacagctgtcttgtgagggaccgagatgcaggatttcttcacgcctcccctttgtgacttcaagagcctctggcatctctttctgcaaaggcacctgaatgtgtctgcgtccctgttagcataatgtgaggaggtggagagacagctcacccccgtgtccaccgtgacccctgttcccatgctgacctgtgtttcctccccagtcatctttcttgttccagagaggtggggctggatgtctccatctctgtctcaactttatgtgcactgagctgcaacttcttacttccctactgaaaataagaatctgaatataaatttgttttctcaaatatttgctatgagaggttgatggattaattaaataagtcaattcctggaatttgagagagcaaataaagacctgagaaccttccagaa

SEQ ID NO: 345256 - DNA, 1005 bp, Artificial Sequence
  derived and/or modified sequence
agatgcgggtcacggcgccccgaaccctcctcctgctgctctggggggcagtggccctgaccgagacctgggctggctcccactccatgaggtatttccacacctccgtgtcccggcccggccgcggggagccccgcttcatctcagtgggctacgtggacggcacccagttcgtgaggttcgacagcgacgccgcgagtccgaggacggagccccgggcgccgtggatagagcaagaggggccggagtattgggaccggaacacacagatctccaagaccaacacacagacttaccgagagagcctgcggaacctgcgcggctactacaaccagagcgaggccgggtctcacaccctccagaggatgtacggctgcgacgtggggccggacgggcgcctcctccgcgggcatgaccagtccgcctacgacggcaaggattacatcgccctgaacgaggacctgagctcctggaccgcggcggacaccgcggctcagatcacccagcgcaagtgggaggcggcccgtgtggcggagcagctgagagcctacctggagggcacgtgcgtggagtggctccgcagacacctggagaacgggaaggagacgctgcagcgcgcggatcaggagcagaagtctctgttccccgctcagagactcgaactttccaatgaatagattatcccagaccccccaaagacacatgtgacccaccaccccatctctgaccatgaggccaccctgaggtgctgggccctgggcttctaccctgcggagatcacactgacctggcagcgggatggcgaggaccaaactcaggacaccgagcttgtggagaccagaccagcaggagatagaaccttccagaagtgggcagctgtggtggtgccttctggagaagagcagagatacacatgccatgtacagcatgaggggctgccgaagcccctcaccctgagatgggagccatcttcccagtccaccatccccatcgtgggcattgttg

SEQ ID NO: 345257 - DNA, 1089 bp, Artificial Sequence
  derived and/or modified sequence
atgagggtgacagcccccaggaccctgctgctgctgctgtggggcgctgtggccctgacagagacctgggccggcagccacagcatgagatacttccacacctctgtgtccaggcctggccgcggggagccccgcttcatctctgtgggctacgtggatggcacccagtttgtgcgctttgacagtgatgctgccagccccaggacagagccccgggccccctggattgagcaggagggccctgagtactgggacaggaacacccagatcagcaagaccaacacccagacctaccgggagagcctgaggaacctgcggggctactacaaccagagcgaggccggcagccacaccctgcagaggatgtatggctgtgatgtgggcccagatggccgcctgctgcggggccatgaccagagcgcctatgatggcaaggactacatcgccctgaatgaagacctgagctcctggacagctgctgacacagctgcccagatcacccagaggaagtgggaggccgcccgggtggccgagcagctgcgggcctacctggagggcacctgtgtggagtggctgcggcggcacctggagaatggcaaggagaccctgcagagagctgacccccccaagacccacgtgacccaccaccccatcagtgaccacgaggccaccctgcgctgctgggccctgggcttctacccagctgagatcaccctgacctggcagagagatggagaggaccagacccaggacacagagctggtggagaccaggcctgctggggacaggaccttccagaagtgggccgctgtggtggtgcccagcggggaggagcagcgctacacctgccacgtgcagcacgagggcctgcccaagcccctgaccctgcgctgggagcccagcagccagagcaccatccccatcgtgggcatcgtggccggcctggccgtgctggccgtggtggtgattggagctgtggtggccaccgtgatgtgcaggaggaagagcagcggcggcaagggcggcagctacagccaggccgccagcagtgacagcgcccagggcagtgatgtgtccctgacagcctag

SEQ ID NO: 345258 - DNA, 675 bp, Artificial Sequence
  derived and/or modified sequence
atgagggtgacagcccccaggaccctgctgctgctgctgtggggcgctgtggccctgacagagacctgggccggcagccacagcatgagatacttccacacctctgtgtccaggcctggccgcggggagccccgcttcatctctgtgggctacgtggatggcacccagtttgtgcgctttgacagtgatgctgccagccccaggacagagccccgggccccctggattgagcaggagggccctgagtactgggacaggaacacccagatcagcaagaccaacacccagacctaccgggagagcctgaggaacctgcggggctactacaaccagagcgaggccggcagccacaccctgcagaggatgtatggctgtgatgtgggcccagatggccgcctgctgcggggccatgaccagagcgcctatgatggcaaggactacatcgccctgaatgaagacctgagctcctggacagctgctgacacagctgcccagatcacccagaggaagtgggaggccgcccgggtggccgagcagctgcgggcctacctggagggcacctgtgtggagtggctgcggcggcacctggagaatggcaaggagaccctgcagagagctgaccaggagcagaagagcctcttccctgcccagaggctggagctgagcaatgaatag

SEQ ID NO: 345259 - DNA, 1089 bp, Artificial Sequence
  derived and/or modified sequence
atgcgggtgaccgccccccggaccctgctgctgctgctgtggggcgctgtagccctgacggagacctgggccggctctcactctatgaggtatttccacacaagtgtgtcccgccctgggagaggggaacctagattcatctccgtaggttacgtggatggtactcagtttgtccggtttgattctgatgctgcttctccgagaacagagccacgagcaccatggatcgagcaagaaggacccgagtactgggatcgcaacacccagatcagtaagaccaatacccagacttaccgtgagtcactgcgcaatttaaggggatattacaaccagtctgaagccggatcccacactctgcagaggatgtatggctgcgacgtaggcccagacggaaggctcctgcgggggcatgaccagtctgcctacgacgggaaagattacatcgcccttaacgaggacctgtcttcatggaccgccgcggacacagccgcacagattacccaacgcaagtgggaggcagcccgggtagcggagcagctgagagcttacctagaaggaacgtgcgtcgagtggctgcgaagacacttggaaaatgggaaggaaacattgcagcgtgcagaccccccaaagacacacgtgacacatcatccgatcagcgatcacgaagccaccttaaggtgctgggcattgggattctacccagcagagatcacactgacctggcagcgagatggggaagaccagacgcaggatacagagttggtggagacccgccctgcaggcgacaggacattccaaaagtgggcagctgtggtcgtcccgtctggagaggagcagcggtatacctgtcatgtccagcacgaagggcttccgaaacctctgaccttacggtgggaaccgtcctcccagtcaacaattccaatcgtgggaattgttgctgggctggctgttctggccgtagtggtcatcggtgctgttgtagctaccgtgatgtgtcggaggaaaagcagcggcgggaaagggggttcttattcacaagccgccagctcagacagcgcccagggatcggacgtgtcgctcaccgcatag

SEQ ID NO: 345260 - DNA, 675 bp, Artificial Sequence
  derived and/or modified sequence
atgcgggtgaccgccccccggaccctgctgctgctgctgtggggcgctgtggccctaacggaaacctgggccggctcacacagtatgcgatactttcacacgtctgtgagtaggcccgggagaggcgaacctcggttcatctcggtgggttacgtggacggaacccagttcgtgaggttcgatagcgatgccgcctctccacggacagagcccagggcaccatggattgagcaggagggccctgaatattgggaccgtaacactcaaattagcaagacaaacactcagacttacagagaaagtctacgcaacctgcgggggtactataatcagagcgaagcaggttcccacacccttcaacgaatgtatggctgcgacgtcggtcccgatggcaggttacttcgggggcacgaccaatctgcttacgacggtaaagactatattgctctcaatgaggacttgtcgtcctggacagcagcagacaccgcggctcagatcacccaacgaaagtgggaagccgctagagtggcagaacaattgcgggcgtacctggaggggacctgcgtagagtggcttagaagacacctggaaaacggtaaggagaccttgcaacgcgcagatcaggagcagaaatctctgtttccagctcagaggttagagctctccaatgagtag

SEQ ID NO: 345261 - DNA, 1089 bp, Artificial Sequence
  derived and/or modified sequence
atgagagttactgctcctaggacgctgctgctgttgctttggggcgctgtggcgctaacagaaacatgggctggaagccattccatgagatactttcatactagtgtgagccgcccaggcaggggggaacccagattcattagcgtaggctatgtggacggcacccagtttgtgcgttttgactcagacgcagcgagtcctaggactgagccgagggcgccttggattgaacaagaaggcccagaatattgggataggaacacacaaatctctaagacaaacacccaaacctaccgagagagtctgcgcaatctgagaggatattacaaccagagcgaggctgggagccatactctacagcggatgtatgggtgcgacgtgggtcctgacggtcgattactcagaggccacgaccaatcagcatacgacgggaaagactacattgcactcaatgaggaccttagttcctggacagctgccgacactgccgctcagatcacccagaggaaatgggaggccgcaagagtggcggagcaactgcgcgcatatctggagggcacttgcgttgaatggttgcggcgacacttagagaacggcaaggaaacactgcaaagggcggatcctcctaaaacgcacgtcacgcaccacccaatttcggatcatgaggcaacactaaggtgttgggccctgggcttctacccagccgagataacactaacatggcagagagacggtgaagaccaaacccaagatactgaattggtggaaacaaggcctgcgggagataggactttccagaaatgggccgctgtggtggtgccctctggcgaggaacaaagatatacctgtcatgtacaacatgaagggctgccaaagcctctgactcttagatgggagccatcaagtcaaagcactatcccgatagtcgggattgtcgccggtctggcagtcctcgctgtggtcgtaatcggcgctgtggtagctacggtgatgtgccgcagaaaaagcagcgggggaaaggggggttcctatagccaggcggcatctagcgatagcgcacaggggagcgacgtctccttgacagcttag

SEQ ID NO: 345262 - DNA, 675 bp, Artificial Sequence
  derived and/or modified sequence
atgcgggttacagcccctcgtactctactgctgctgctgtggggggctgtggcccttaccgagacatgggcaggttcccactcgatgagatacttccacacaagtgtgtcacgacctggcagaggggagccaaggttcatctccgttggctatgtcgacggcacgcagttcgttagattcgactccgacgcagcttccccgaggaccgagccgcgtgccccatggatcgagcaagagggtccggaatactgggaccggaacacccagatcagcaagactaatacccagacatatagggaatcactgaggaacctccgcggttactacaatcagagtgaagcgggaagccacactctgcaacgcatgtacgggtgcgacgtggggccagacggaaggctcctgagaggccatgatcaaagcgcatatgacgggaaggattacatagctttgaacgaagacttgtcaagttggacagcagcagatactgcggcacaaatcactcagcgaaaatgggaagccgcaagggtggctgagcaactgagagcgtacctcgagggaacatgcgtggagtggctccgacgtcatcttgagaatggaaaggaaacattgcagcgggcagatcaggagcagaagtctctgttccctgcccagagactcgaattgagcaatgaatag

SEQ ID NO: 345263 - DNA, 1214 bp, Artificial Sequence
  derived and/or modified sequence
ccattaggtttgagctgtgttgactaccactgctttttccttggtctcacttatgtcttggaagatggctctgcagatccctggaggcttttgggcagcagctgtgaccgtgatgctggtgatgctgagcaccccagtggctgaggccagagactttcccaaggatttcttggtccagtttaagggcatgtgctacttcaccaacgggacagagcgcgtgcggggtgtggccagatacatctataaccgcgaggagtacgggcgcttcgacagcgacgttggggagttccaggcggtgaccgagctggggcggagcatcgaggactggaacaactataaggacttcttggagcaggagcgggccgcggtggacaaggtgtgcagacacaactacgaggcggagctacgcacgaccttgcagcggcaagtggagcccacagtgaccatctccccatccaggacagaggccctcaaccaccacaacctgctggtctgctcagtgacagatttctatccagcccagatcaaagtccagtggtttcggaatgaccaggaggagacagccggtgttgtgtccacctccctcattaggaatggtgactggaccttccagattctggtgatgctggaaataactccccagcgtggagacatctacacctgccaagtggagcaccccagcctccagagccccatcaccgtggagtggcgggctcagtctgaatctgcccagagcaagatgctgggtggtgttggaggcttcgtgctggggctgatcttcctcgggctgggccttatcatccgtcacaggggtcagaaaggacctcgagggcctccacctgcaggactcctgcactgactcctgaggacttttgtctgggattggtcatcactcttctttaatgcccacctgcccctgcccagaattcctagctgcctgtttcaccctgtcccactgaggtcagagtcctacagtggctcatgcagccacaggtcaccttctgtgatccccaccccaaggcactggcggtgactctgcttcctgcactgacccagagcctctgcctgtgcactgcaagctgtgtctactcaggccccaaggggcatctctgtttccattctccccccacagacctgtcaagagaagcatgacaaacaaaatcatttacctgactttagtgctttttcccataattaaacctgattctgagtta

SEQ ID NO: 345264 - DNA, 1214 bp, Artificial Sequence
  derived and/or modified sequence
ccattaggtttgagctgtgttgactaccactgctttttccttggtctcacttacgtcttggaagatggctctgcagatccctggaggcttttgggcagcagctgtgaccgtgatgctggtgatgctgagcaccccagtggctgaggccagagactttcccaaggatttcttggtccagtttaagggcatgtgctacttcaccaacgggacagagcgcgtgcgcggtgtggccagatacatctataaccgcgaggagtacgggcgcttcgacagcgacgttggggagttccaggcggtgaccgagctggggcggagcatcgaggactggaacaactataaggacttcttggagcaggagcgggccgcggtggacaaggtgtgcagacacaactacgaggcggagctgcgcacgaccttgcagcggcaagtggagcccacagtgaccatctccccatccaggacagaggccctcaaccaccacaacctgctggtctgctcagtgacagatttctatccagcccagatcaaagtccggtggtttcggaatgaccaggaggagacagccggtgttgtgtccacctccctcattaggaatggtgactggaccttccagattctggtgatgctggaaataactccccagcgtggagacatctacacctgccaagtggagcaccccagcctccagagccccatcaccgtggagtggcgggctcagtctgaatctgcccagagcaagatgctgagtggcattggaggcttcgtgctggggctgatcttcctcgggctgggccttatcatccgtcacaggggtcagaaaggacctcgagggcctccaccagcaggactcctgcactgactcctgaggacttttgtctgggattggtcatcactcttctgtaatgcccacctgcccctgcccagaattcctagctgcctgtgtcaccctgtcccactgaggtcagagtcctacagtggctcatgcagccacaggtcaccttctgtgatccccatcccaaggcactggtggtgactctgcttcctgcactgacccagagcctctgcctgtgcactgcaagctgtgtctactcaggccccaaggggcatctctgtttccattctccccccacagacctgtcaagagaagcatgacaaacaaaatcatttacctgactttagtgctttttcccataattaaacctgattctgagtta

SEQ ID NO: 345265 - DNA, 1214 bp, Artificial Sequence
  derived and/or modified sequence
ccattaggtttgagctgtgttgactaccactgctttttccttggtctcacttacgtcttggaagatggctctgcagatccctggaggcttttgggcagcagctgtgaccgtgatgctggtgatgctgagcaccccagtggctgaggccagagactttcccaaggatttcttggtccagtttaagggcatgtgctacttcaccaacgggacagagcgcgtgcgcggtgtggccagatacatctataaccgcgaggagtacgggcgcttcgacagcgacgttggggagttccaggcggtgaccgagctggggcggagcatcgaggactggaacaactataaggacttcttggagcaggagcgggccgcggtggacaaggtgtgcagacacaactacgaggcggagctgcgcacgaccttgcagcggcaagtggagcccacagtgaccatctccccatccaggacagaggccctcaaccaccacaacctgctggtctgctcggtgacagatttctatccagcccagatcaaagtccggtggtttcggaatgaccaggaggagacagccggtgttgtgtccacctccctcattaggaatggtgactggaccttccagattctggtgatgctggaaataactccccagcgtggagacatctacacctgccaagtggagcaccccagcctccagagccccatcaccgtggagtggcgggctcagtctgaatctgcccagagcaagatgctgagtggcattggaggcttcgtgctggggctgatcttcctcgggctgggccttatcatccgtcacaggggtcagaaaggacctcgagggcctccaccagcaggactcctgcactgactcctgaggacttttgtctgggattggtcatcactcttctgtaatgcccacctgcccctgcccagaattcctagctgcctgtgtcaccctgtcccactgaggtcagagtcctacagtggctcatgcagccacaggtcaccttctgtgatccccatcccaaggcactggtggtgactctgcttcctgcactgacccagagcctctgcctgtgcactgcaagctgtgtctactcaggccccaaggggcatctctgtttccattctccccccacagacctgtcaagagaagcatgacaaacaaaatcatttacctgactttagtgctttttcccataattaaacctgattctgagtta

SEQ ID NO: 345266 - DNA, 1214 bp, Artificial Sequence
  derived and/or modified sequence
ccattaggtttgagctgtgttgactaccactgctttttccttggtctcacttatgtcttggaagatggctctgcagatccctggaggcttttgggcagcagctgtgaccgtgatgctggtgatgctgagcaccccagtggctgaggccagagactttcccaaggatttcttggtccagtttaagggcatgtgctacttcaccaacgggacagagcgcgtgcggggtgtggccagatacatctataaccgcgaggagtacgggcgcttcgacagcgacgttggggagttccaggcggtgaccgagctggggcggagcatcgaggactggaacaactataaggacttcttggagcaggagcgggccgcggtggacaaggtgtgcagacacaactacgaggcggagctacgcacgaccttgcagcggcaagtggagcccacagtgaccatctccccatccaggacagaggccctcaaccaccacaacctgctggtctgctcagtgacagatttctatccagcccagatcaaagtccagtggtttcggaatgaccaggaggagacagccggtgttgtgtccacctccctcattaggaatggtgactggaccttccagattctggtgatgctggaaataactccccagcgtggagacatctacacctgccaagtggagcaccccagcctccagagccccatcaccgtggagtggcgggctcagtctgaatctgcccagagcaagatgctgggtggtgttggaggcttcgtgctggggctgatcttcctcgggctgggccttatcatccgtcacaggggtcagaaaggacctcgagggcctccacctgcaggactcctgcactgactcctgaggacttttgtctgggattggtcatcactcttctgtaatgcccacctgcccctgcccagaattcctagctgcctgtgtcatcctgtcccactgaggtcagagtcctacagtggctcatgcagccacaggtcaccttctgtgatccccatcccaaggcactggcggtgactctgcttcctgcactgacccagagcctctgcctgtgcactgcaagctgtgtctactcaggccccaaggggcatctctgtttccattctccccccacagacctgtcaagagaagcatgacaaacaaaatcatttacctaactttagtgctttttcccataattaaacctgattctgagtta

SEQ ID NO: 345267 - protein, 218 aa, Artificial Sequence
  derived and/or modified sequence
  misc_feature (1)..(1): Xaa can be any naturally occurring amino acid
XLQIPGGFWAAAVTVMLVMLSTPVAEARDFPKDFLVQFKGMCYFTNGTERVRGVARYIYNREEYGRFDSDVGEFQAVTELGRSIEDWNNYKDFLEQERAAVDKVCRHNYEAELRTTLQRQVEPTVTISPSRTEALNHHNLLVCSVTDFYPAQIKVQWFRNDQEETAGVVSTSLIRNGDWTFQILVMLEITPQRGDIYTCQVEHPSLQSPITVEWRLLH

SEQ ID NO: 345268 - DNA, 657 bp, Artificial Sequence
  derived and/or modified sequence
tgactgcagatccccggcggcttctgggccgccgccgtgaccgtgatgctggtgatgctgagcacccccgtggccgaggccagagacttccccaaggacttcctggtgcagttcaagggcatgtgctacttcaccaacggcaccgagagagtgagaggcgtggccagatacatctacaacagagaggagtacggcagattcgacagcgacgtgggcgagttccaggccgtgaccgagctgggcagaagcatcgaggactggaacaactacaaggacttcctggagcaggagagagccgccgtggacaaggtgtgcagacacaactacgaggccgagctgagaaccaccctgcagagacaggtggagcccaccgtgaccatcagccccagcagaaccgaggccctgaaccaccacaacctgctggtgtgcagcgtgaccgacttctaccccgcccagatcaaggtgcagtggttcagaaacgaccaggaggagaccgccggcgtggtgagcaccagcctgatcagaaacggcgactggaccttccagatcctggtgatgctggagatcaccccccagagaggcgacatctacacctgccaggtggagcaccccagcctgcagagccccatcaccgtggagtggagactgctgcactag

SEQ ID NO: 345269 - DNA, 657 bp, Artificial Sequence
  derived and/or modified sequence
tagctccagattcctggcgggttttgggccgccgctgtgactgttatgctggtgatgttgtctacacccgtggcagaggctagagatttcccaaaggatttcctcgtacagttcaaggggatgtgttacttcacaaacggaactgaacgcgtgcgtggggtggcacgctatatctataacagggaagagtatggtcgttttgacagcgacgtgggcgagtttcaggcagtgacagagctgggcagatcgatcgaagattggaataactataaggattttttggagcaggagagagccgcggtggacaaagtatgtaggcataactacgaggccgagctgaggacgacactgcagcggcaagtggaaccaaccgtaactatctccccctcccgaacagaagccctgaaccaccataaccttctggtatgcagcgttacagatttctaccctgcccagattaaagttcagtggttcagaaacgaccaagaggagacagctggggtcgtttccacctcactcatcagaaatggcgattggaccttccagattttggtgatgctcgagatcacacctcagcgcggtgacatctatacttgccaagttgaacatccctcactgcagagtccaataacagttgaatggcgactgttacactag

SEQ ID NO: 345270 - DNA, 657 bp, Artificial Sequence
  derived and/or modified sequence
taactgcagattcccgggggcttttgggcagcagccgttaccgtgatgcttgttatgctgtctacccctgtggcggaggcccgagacttccccaaagatttcctcgtccaattcaagggcatgtgctattttacaaatgggacagaacgtgtcagaggggtagcccgatatatttacaacagggaagaatatgggaggtttgattctgatgtaggcgagttccaggccgtgaccgaattgggacggtctattgaagactggaacaactacaaggatttcctcgaacaggaaagggcagccgtggataaagtgtgcagacataactatgaggccgagctgcgaacaactctccagcgacaggtggagccgaccgttaccatttccccatctaggacagaggccttgaatcaccataacctcctagtgtgctctgttaccgacttctacccagcccaaatcaaggtgcagtggttcaggaatgaccaggaggagaccgcaggcgtcgtgtccacatcactcataaggaacggggattggacttttcagatcttagtgatgctcgagatcacccctcagcggggagatatctatacctgtcaggtcgagcacccctcactccagtccccaatcaccgttgagtggcgcctgcttcactag

SEQ ID NO: 345271 - DNA, 657 bp, Artificial Sequence
  derived and/or modified sequence
tgactgcagataccgggcggcttttgggcggccgcagtgacagtgatgctcgtcatgctgagcacccccgtggcggaagctcgagatttcccaaaggattttcttgtccagtttaagggaatgtgttattttactaatggaacagaaagggtgcggggtgttgcgagatacatctataatagagaagagtacgggcgcttcgactcagatgtaggcgaattccaggccgtgaccgagctgggtcgctctattgaggactggaacaactataaggactttttagaacaagaacgggccgctgtcgataaggtctgcagacacaactatgaagcagagctcaggaccactctgcaaaggcaggtagagcctaccgtcactatttcaccctcgaggacggaagcgttaaaccaccacaatctcctggtctgttccgtaaccgatttttatcctgcgcaaatcaaggtgcagtggttcagaaacgatcaggaggagacagcaggggtggttagcaccagtctgatccggaatggggactggacattccaaattctcgttatgctcgagatcaccccacagagaggagatatctacacatgtcaggtggaacacccgtctctgcagtcaccgataacggtggaatggaggctcctgcattag

SEQ ID NO: 345272 - DNA, 657 bp, Artificial Sequence
  derived and/or modified sequence
tgactgcagatccctgggggcttctgggctgcagccgtgactgtaatgcttgtgatgctcagcacccccgtagcggaagcccgcgacttcccgaaggactttctggtacagtttaaggggatgtgttacttcaccaatggaactgagagggtgcggggtgttgcaagatatatctacaacagagaagagtacggacgctttgattccgatgtgggagagttccaggcagtgacagaattggggcgctctatcgaggattggaacaattataaagactttctagagcaggaacgcgccgccgtggataaagtctgcaggcataactatgaagccgagctcaggactactttacaacgtcaagtagagcccaccgtcaccatctcacctagcaggaccgaggctctgaaccaccacaacttactggtctgtagcgttaccgatttttatccagcccagataaaggtccagtggttccgtaacgaccaggaggagaccgcgggcgtggtctcaacatctctgatccgtaatggtgattggacattccagatactggtgatgctggagattactccacaacgaggggacatctatacctgtcaagtggaacacccttctcttcagtctccaattacggtagagtggcggctgttgcactag

SEQ ID NO: 345273 - DNA, 657 bp, Artificial Sequence
  derived and/or modified sequence
tgactgcagatccctgggggcttctgggccgctgctgtgacagtgatgctggtgatgctgagcacccctgtggccgaggcccgggacttccccaaggacttcctggtgcagttcaagggcatgtgctacttcaccaacggcacagagcgggtgcggggcgtggcccgctacatctacaaccgggaggagtatggccgctttgacagtgatgtgggggagttccaggccgtgacagagctgggccgcagcattgaggactggaacaactacaaggacttcctggagcaggagagagctgctgtggacaaggtgtgccgccacaactatgaagctgagctgcggaccaccctgcagaggcaggtggagcccaccgtgaccatcagccccagcaggacagaggccctgaaccaccacaacctgctggtgtgcagcgtgacagacttctacccagcccagatcaaggtgcagtggttcagaaatgaccaggaggagacagctggggtggtgtccaccagcctcatcagaaatggagactggaccttccagatcctggtgatgctggagatcaccccccagagaggagacatctacacctgccaggtggagcaccccagcctgcagagccccatcaccgtggagtggaggctgctgcactag

SEQ ID NO: 345274 - DNA, 1059 bp, Artificial Sequence
  derived and/or modified sequence
tctcacttatgtcttggaagatggctctgcagatccctggaggcttttgggcagcagctgtgaccgtgatgctggtgatgctgagcaccccagtggctgaggccagagactttcccaaggatttcttggtccagtttaagggcatgtgctacttcaccaacgggacagagcgcgtgcggggtgtggccagatacatctataaccgcgaggagtacgggcgcttcgacagcgacgttggggagttccaggcggtgaccgagctggggcggagcatcgaggactggaacaactataaggacttcttggagcaggagcgggccgcggtggacaaggtgtgcagacacaactacgaggcggagctacgcacgaccttgcagcggcaagtggagcccacagtgaccatctccccatccaggacagaggccctcaaccaccacaacctgctggtctgctcagtgacagatttctatccagcccagatcaaagtccagtggtttcggaatgaccaggaggagacagccggtgttgtgtccacctccctcattaggaatggtgactggaccttccagattctggtgatgctggaaataactccccagcgtggagacatctacacctgccaagtggagcaccccagcctccagagccccatcaccgtggagtggcgacctcgagggcctccacctgcaggactcctgcactgactcctgaggacttttgtctgggattggtcatcactcttctttaatgcccacctgcccctgcccagaattcctagctgcctgtttcaccctgtcccactgaggtcagagtcctacagtggctcatgcagccacaggtcaccttctgtgatccccaccccaaggcactggcggtgactctgcttcctgcactgacccagagcctctgcctgtgcactgcaagctgtgtctactcaggccccaaggggcatctctgtttccattctccccccacagacctgtcaagagaagcatgacaaacaaaatcatttacctgactttagtgctttttcccataattaaacctgattctgagtta

SEQ ID NO: 345275 - DNA, 1059 bp, Artificial Sequence
  derived and/or modified sequence
tctcacttacgtcttggaagatggctctgcagatccctggaggcttttgggcagcagctgtgaccgtgatgctggtgatgctgagcaccccagtggctgaggccagagactttcccaaggatttcttggtccagtttaagggcatgtgctacttcaccaacgggacagagcgcgtgcgcggtgtggccagatacatctataaccgcgaggagtacgggcgcttcgacagcgacgttggggagttccaggcggtgaccgagctggggcggagcatcgaggactggaacaactataaggacttcttggagcaggagcgggccgcggtggacaaggtgtgcagacacaactacgaggcggagctgcgcacgaccttgcagcggcaagtggagcccacagtgaccatctccccatccaggacagaggccctcaaccaccacaacctgctggtctgctcggtgacagatttctatccagcccagatcaaagtccggtggtttcggaatgaccaggaggagacagccggtgttgtgtccacctccctcattaggaatggtgactggaccttccagattctggtgatgctggaaataactccccagcgtggagacatctacacctgccaagtggagcaccccagcctccagagccccatcaccgtggagtggcgacctcgagggcctccaccagcaggactcctgcactgactcctgaggacttttgtctgggattggtcatcactcttctgtaatgcccacctgcccctgcccagaattcctagctgcctgtgtcaccctgtcccactgaggtcagagtcctacagtggctcatgcagccacaggtcaccttctgtgatccccatcccaaggcactggtggtgactctgcttcctgcactgacccagagcctctgcctgtgcactgcaagctgtgtctactcaggccccaaggggcatctctgtttccattctccccccacagacctgtcaagagaagcatgacaaacaaaatcatttacctgactttagtgctttttcccataattaaacctgattctgagtta

SEQ ID NO: 345276 - DNA, 721 bp, Artificial Sequence
  derived and/or modified sequence
ctctgcagatccctggaggcttttgggcagcagctgtgaccgtgatgctggtgatgctgagcaccccagtggctgaggccagagactttcccaaggatttcttggtccagtttaagggcatgtgctacttcaccaacgggacagagcgcgtgcggggtgtggccagatacatctataaccgcgaggagtacgggcgcttcgacagcgacgttggggagttccaggcggtgaccgagctggggcggagcatcgaggactggaacaactataaggacttcttggagcaggagcgggccgcggtggacaaggtgtgcagacacaactacgaggcggagctacgcacgaccttgcagcggcaagtggagcccacagtgaccatctccccatccaggacagaggccctcaaccaccacaacctgctggtctgctcagtgacagatttctatccagcccagatcaaagtccagtggtttcggaatgaccaggaggagacagccggtgttgtgtccacctccctcattaggaatggtgactggaccttccagattctggtgatgctggaaataactccccagcgtggagacatctacacctgccaagtggagcaccccagcctccagagccccatcaccgtggagtggcgactcctgcactgactcctgaggacttttgtctgggattggtcatcactcttctttaatgcccacctgcccctgcccag

SEQ ID NO: 345277 - DNA, 1059 bp, Artificial Sequence
  derived and/or modified sequence
tctcacttatgtcttggaagatggctctgcagatccctggaggcttttgggcagcagctgtgaccgtgatgctggtgatgctgagcaccccagtggctgaggccagagactttcccaaggatttcttggtccagtttaagggcatgtgctacttcaccaacgggacagagcgcgtgcggggtgtggccagatacatctataaccgcgaggagtacgggcgcttcgacagcgacgttggggagttccaggcggtgaccgagctggggcggagcatcgaggactggaacaactataaggacttcttggagcaggagcgggccgcggtggacaaggtgtgcagacacaactacgaggcggagctacgcacgaccttgcagcggcaagtggagcccacagtgaccatctccccatccaggacagaggccctcaaccaccacaacctgctggtctgctcagtgacagatttctatccagcccagatcaaagtccagtggtttcggaatgaccaggaggagacagccggtgttgtgtccacctccctcattaggaatggtgactggaccttccagattctggtgatgctggaaataactccccagcgtggagacatctacacctgccaagtggagcaccccagcctccagagccccatcaccgtggagtggcgacctcgagggcctccacctgcaggactcctgcactgactcctgaggacttttgtctgggattggtcatcactcttctgtaatgcccacctgcccctgcccagaattcctagctgcctgtgtcatcctgtcccactgaggtcagagtcctacagtggctcatgcagccacaggtcaccttctgtgatccccatcccaaggcactggcggtgactctgcttcctgcactgacccagagcctctgcctgtgcactgcaagctgtgtctactcaggccccaaggggcatctctgtttccattctccccccacagacctgtcaagagaagcatgacaaacaaaatcatttacctaactttagtgctttttcccataattaaacctgattctgagtta

SEQ ID NO: 345278 - DNA, 721 bp, Artificial Sequence
  derived and/or modified sequence
ctctgcagatccctggaggcttttgggcagcagctgtgaccgtgatgctggtgatgctgagcaccccagtggctgaggccagagactttcccaaggatttcttggtccagtttaagggcatgtgctacttcaccaacgggacagagcgcgtgcggggtgtggccagatacatctataaccgcgaggagtacgggcgcttcgacagcgacgttggggagttccaggcggtgaccgagctggggcggagcatcgaggactggaacaactataaggacttcttggagcaggagcgggccgcggtggacaaggtgtgcagacacaactacgaggcggagctacgcacgaccttgcagcggcaagtggagcccacagtgaccatctccccatccaggacagaggccctcaaccaccacaacctgctggtctgctcagtgacagatttctatccagcccagatcaaagtccagtggtttcggaatgaccaggaggagacagccggtgttgtgtccacctccctcattaggaatggtgactggaccttccagattctggtgatgctggaaataactccccagcgtggagacatctacacctgccaagtggagcaccccagcctccagagccccatcaccgtggagtggcgactcctgcactgactcctgaggacttttgtctgggattggtcatcactcttctgtaatgcccacctgcccctgcccag

SEQ ID NO: 345279 - DNA, 1059 bp, Artificial Sequence
  derived and/or modified sequence
tctcacttacgtcttggaagatggctctgcagatccctggaggcttttgggcagcagctgtgaccgtgatgctggtgatgctgagcaccccagtggctgaggccagagactttcccaaggatttcttggtccagtttaagggcatgtgctacttcaccaacgggacagagcgcgtgcgcggtgtggccagatacatctataaccgcgaggagtacgggcgcttcgacagcgacgttggggagttccaggcggtgaccgagctggggcggagcatcgaggactggaacaactataaggacttcttggagcaggagcgggccgcggtggacaaggtgtgcagacacaactacgaggcggagctgcgcacgaccttgcagcggcaagtggagcccacagtgaccatctccccatccaggacagaggccctcaaccaccacaacctgctggtctgctcagtgacagatttctatccagcccagatcaaagtccggtggtttcggaatgaccaggaggagacagccggtgttgtgtccacctccctcattaggaatggtgactggaccttccagattctggtgatgctggaaataactccccagcgtggagacatctacacctgccaagtggagcaccccagcctccagagccccatcaccgtggagtggcgacctcgagggcctccaccagcaggactcctgcactgactcctgaggacttttgtctgggattggtcatcactcttctgtaatgcccacctgcccctgcccagaattcctagctgcctgtgtcaccctgtcccactgaggtcagagtcctacagtggctcatgcagccacaggtcaccttctgtgatccccatcccaaggcactggtggtgactctgcttcctgcactgacccagagcctctgcctgtgcactgcaagctgtgtctactcaggccccaaggggcatctctgtttccattctccccccacagacctgtcaagagaagcatgacaaacaaaatcatttacctgactttagtgctttttcccataattaaacctgattctgagtta

SEQ ID NO: 345280 - DNA, 1122 bp, Artificial Sequence
  derived and/or modified sequence
tccggcaggtacataagatccattaggtttgagctgtgttgactaccactgctttttccttggtctcacttatgtcttggaagatggctctgcagatccctggaggcttttgggcagcagctgtgaccgtgatgctggtgatgctgagcaccccagtggctgaggccagagactttcccaaggatttcttggtccagtttaagggcatgtgctacttcaccaacgggacagagcgcgtgcggggtgtggccagatacatctataaccgcgaggagtacgggcgcttcgacagcgacgttggggagttccaggcggtgaccgagctggggcggagcatcgaggactggaacaactataaggacttcttggagcaggagcgggccgcggtggacaaggtgtgcagacacaactacgaggcggagctacgcacgaccttgcagcggcaagtggagcccacagtgaccatctccccatccaggacagaggccctcaaccaccacaacctgctggtctgctcagtgacagatttctatccagcccagatcaaagtccagtggtttcggaatgaccaggaggagacagccggtgttgtgtccacctccctcattaggaatggtgactggaccttccagattctggtgatgctggaaataactccccagcgtggagacatctacacctgccaagtggagcaccccagcctccagagccccatcaccgtggagtggcgacctcgagggcctccacctgcaggactcctgcactgactcctgaggacttttgtctgggattggtcatcactcttctgtaatgcccacctgcccctgcccagaattcctagctgcctgtgtcatcctgtcccactgaggtcagagtcctacagtggctcatgcagccacaggtcaccttctgtgatccccatcccaaggcactggcggtgactctgcttcctgcactgacccagagcctctgcctgtgcactgcaagctgtgtctactcaggccccaaggggcatctctgtttccattctccccccacagacctgtcaagagaagcatgacaaacaaaatcatttacctaactttagtgctttttcccataattaaacctgattctgagtta

SEQ ID NO: 345281 - DNA, 1122 bp, Artificial Sequence
  derived and/or modified sequence
tccggcaggtacataagttccattaggtttgagctgtgttgactaccactgctttttccttggtctcacttacgtcttggaagatggctctgcagatccctggaggcttttgggcagcagctgtgaccgtgatgctggtgatgctgagcaccccagtggctgaggccagagactttcccaaggatttcttggtccagtttaagggcatgtgctacttcaccaacgggacagagcgcgtgcgcggtgtggccagatacatctataaccgcgaggagtacgggcgcttcgacagcgacgttggggagttccaggcggtgaccgagctggggcggagcatcgaggactggaacaactataaggacttcttggagcaggagcgggccgcggtggacaaggtgtgcagacacaactacgaggcggagctgcgcacgaccttgcagcggcaagtggagcccacagtgaccatctccccatccaggacagaggccctcaaccaccacaacctgctggtctgctcagtgacagatttctatccagcccagatcaaagtccggtggtttcggaatgaccaggaggagacagccggtgttgtgtccacctccctcattaggaatggtgactggaccttccagattctggtgatgctggaaataactccccagcgtggagacatctacacctgccaagtggagcaccccagcctccagagccccatcaccgtggagtggcgacctcgagggcctccaccagcaggactcctgcactgactcctgaggacttttgtctgggattggtcatcactcttctgtaatgcccacctgcccctgcccagaattcctagctgcctgtgtcaccctgtcccactgaggtcagagtcctacagtggctcatgcagccacaggtcaccttctgtgatccccatcccaaggcactggtggtgactctgcttcctgcactgacccagagcctctgcctgtgcactgcaagctgtgtctactcaggccccaaggggcatctctgtttccattctccccccacagacctgtcaagagaagcatgacaaacaaaatcatttacctgactttagtgctttttcccataattaaacctgattctgagtta

SEQ ID NO: 345282 - DNA, 1122 bp, Artificial Sequence
  derived and/or modified sequence
tccggcaggtacataagatccattaggtttgagctgtgttgactaccactgctttttccttggtctcacttatgtcttggaagatggctctgcagatccctggaggcttttgggcagcagctgtgaccgtgatgctggtgatgctgagcaccccagtggctgaggccagagactttcccaaggatttcttggtccagtttaagggcatgtgctacttcaccaacgggacagagcgcgtgcggggtgtggccagatacatctataaccgcgaggagtacgggcgcttcgacagcgacgttggggagttccaggcggtgaccgagctggggcggagcatcgaggactggaacaactataaggacttcttggagcaggagcgggccgcggtggacaaggtgtgcagacacaactacgaggcggagctacgcacgaccttgcagcggcaagtggagcccacagtgaccatctccccatccaggacagaggccctcaaccaccacaacctgctggtctgctcagtgacagatttctatccagcccagatcaaagtccagtggtttcggaatgaccaggaggagacagccggtgttgtgtccacctccctcattaggaatggtgactggaccttccagattctggtgatgctggaaataactccccagcgtggagacatctacacctgccaagtggagcaccccagcctccagagccccatcaccgtggagtggcgacctcgagggcctccacctgcaggactcctgcactgactcctgaggacttttgtctgggattggtcatcactcttctttaatgcccacctgcccctgcccagaattcctagctgcctgtttcaccctgtcccactgaggtcagagtcctacagtggctcatgcagccacaggtcaccttctgtgatccccaccccaaggcactggcggtgactctgcttcctgcactgacccagagcctctgcctgtgcactgcaagctgtgtctactcaggccccaaggggcatctctgtttccattctccccccacagacctgtcaagagaagcatgacaaacaaaatcatttacctgactttagtgctttttcccataattaaacctgattctgagtta

SEQ ID NO: 345283 - DNA, 1122 bp, Artificial Sequence
  derived and/or modified sequence
tccggcaggtacataagatccattaggtttgagctgtgttgactaccactgctttttccttggtctcacttacgtcttggaagatggctctgcagatccctggaggcttttgggcagcagctgtgaccgtgatgctggtgatgctgagcaccccagtggctgaggccagagactttcccaaggatttcttggtccagtttaagggcatgtgctacttcaccaacgggacagagcgcgtgcgcggtgtggccagatacatctataaccgcgaggagtacgggcgcttcgacagcgacgttggggagttccaggcggtgaccgagctggggcggagcatcgaggactggaacaactataaggacttcttggagcaggagcgggccgcggtggacaaggtgtgcagacacaactacgaggcggagctgcgcacgaccttgcagcggcaagtggagcccacagtgaccatctccccatccaggacagaggccctcaaccaccacaacctgctggtctgctcggtgacagatttctatccagcccagatcaaagtccggtggtttcggaatgaccaggaggagacagccggtgttgtgtccacctccctcattaggaatggtgactggaccttccagattctggtgatgctggaaataactccccagcgtggagacatctacacctgccaagtggagcaccccagcctccagagccccatcaccgtggagtggcgacctcgagggcctccaccagcaggactcctgcactgactcctgaggacttttgtctgggattggtcatcactcttctgtaatgcccacctgcccctgcccagaattcctagctgcctgtgtcaccctgtcccactgaggtcagagtcctacagtggctcatgcagccacaggtcaccttctgtgatccccatcccaaggcactggtggtgactctgcttcctgcactgacccagagcctctgcctgtgcactgcaagctgtgtctactcaggccccaaggggcatctctgtttccattctccccccacagacctgtcaagagaagcatgacaaacaaaatcatttacctgactttagtgctttttcccataattaaacctgattctgagtta

SEQ ID NO: 345284 - DNA, 657 bp, Artificial Sequence
  derived and/or modified sequence
tgactgcagatccccggcggcttctgggccgccgccgtgaccgtgatgctggtcatgttgtcaactccagtggccgaagcccgcgacttccccaaggacttcctcgtacagtttaaaggaatgtgttacttcaccaacggtactgaacgagtccgcggcgtcgctcgctatatatacaaccgagaagaatacggccgctttgatagcgatgtcggcgaattccaggccgttacagagctgggcagaagcattgaggattggaataattataaggattttctcgaacaggagcgcgctgctgttgacaaagtgtgccgccacaactacgaggcggaacttagaacgacccttcaacgtcaggtggagcccactgtgacgataagcccttccaggactgaagccctgaaccaccacaacctcctggtgtgcagtgtcacggatttctaccctgctcagatcaaagtgcagtggtttcgaaacgatcaggaggaaactgctggggtggtcagtacatctctgattcgcaacggcgattggaccttccaaattctggttatgttggagatcaccccgcagagaggggatatatacacatgtcaagtggaacacccatcactacagtctcccattacagtcgaatggcgactgctgcactag

SEQ ID NO: 345285 - DNA, 657 bp, Artificial Sequence
  derived and/or modified sequence
tgactgcagatccccggcggcttctgggccgccgccgtgaccgtgatgttggtgatgttgtcgacacccgtggctgaggctagggactttcctaaggacttcttggtccagtttaaaggcatgtgctattttaccaatggaacagaaagggtaagaggagtcgctcggtatatttacaacagagaagagtacgggcgcttcgacagcgacgtaggagagttccaggctgtgactgagctgggtagaagcattgaagattggaacaactataaggatttcctcgagcaggaacgagccgccgttgataaggtgtgccggcacaactatgaagcagagctaaggacgacattacagcggcaggttgagcctaccgtgacgatttctccgagtaggaccgaagcattgaatcatcataatctactcgtgtgtagtgtcactgatttttacccagcacagataaaagtgcagtggtttaggaatgatcaagaggaaactgccggcgtggtaagtaccagtctcattagaaacggagattggacctttcaaattctggttatgcttgagatcacgccccagcggggagacatttacacctgccaggttgaacatccgagtctccagagtcccattactgtggaatggaggctgctgcactag

SEQ ID NO: 345286 - DNA, 657 bp, Artificial Sequence
  derived and/or modified sequence
tgactgcagatccccggcggcttctgggccgccgccgtgaccgtgatgctagtgatgttatcaacgccagtggctgaggcaagggactttccaaaggatttcctcgtgcaatttaagggtatgtgctactttactaatgggacggagcgggtgagaggtgtggcaagatacatctacaacagggaggaatatggacggtttgattctgacgttggagaatttcaggcagtgactgagctgggccggagtatcgaggactggaataattacaaagatttcctagaacaagaaagggccgcagtggacaaggtctgcagacataactatgaggctgaattgcgaaccacattgcaacgccaggtggaacctacagtgacaataagcccctctagaaccgaagctcttaatcaccacaacctgctcgtgtgcagtgttactgatttctaccccgcccaaatcaaagtccagtggttccgaaacgatcaggaggagaccgctggagtggtgtccacctccctaattagaaacggtgactggacgttccagatactagtgatgctcgagatcactccccaaaggggggatatttatacatgccaggtggaacacccatctctgcaatcacccataacggtggaatggcgattacttcactag

SEQ ID NO: 345287 - DNA, 657 bp, Artificial Sequence
  derived and/or modified sequence
tgactgcagatccccggcggcttctgggccgccgccgtgaccgtgatgcttgtcatgttatcaactccggttgcagaggcgagagattttcccaaggacttcttggtccagttcaagggaatgtgctactttaccaacgggaccgagagggtccggggtgttgcccgctacatatacaatcgtgaagaatatggacgtttcgacagcgacgtcggcgagttccaggccgtaaccgagctgggcagatccattgaagattggaacaattataaagatttcctcgaacaggagcgagccgcagtagataaagtgtgcaggcacaattatgaagctgagcttaggacaacacttcaacggcaggtggagccaactgtgactatctctccgtctcgcaccgaggcattaaatcaccataacctgcttgtatgcagtgtgacagatttttatcccgcccagatcaaggtccagtggttccgcaacgaccaggaagagaccgcaggagtggttagtacctcactgatacgcaacggtgactggacgtttcaaattctcgttatgcttgaaattaccccgcagcggggcgacatatatacgtgtcaggtagagcatcctagtctgcaaagccccatcaccgtagaatggcggttgctgcattag

SEQ ID NO: 345288 - DNA, 657 bp, Artificial Sequence
  derived and/or modified sequence
tgattgcagattcccggtggcttttgggctgcagccgtgacagttatgctggtgatgttgtccacgccagtggcagaggctcgggacttccccaaagatttcttggtccagttcaaagggatgtgttacttcacaaatgggacagagcgggtcagaggcgtggccagatacatttataaccgcgaagaatatggaaggtttgactcagatgtgggagaattccaagcagtgacagaactgggaaggagcatcgaagactggaataactacaaggattttctggagcaggaacgcgcagccgtggataaagtgtgtcggcacaactacgaagccgagttgaggacaaccctacagagacaagttgaaccaacggtaaccatctctccatctaggaccgaagccttaaaccatcacaacttgctcgtgtgttctgtgaccgacttctacccagctcagatcaaggtgcagtggtttcggaacgaccaggaggaaactgccggtgtagtcagcacctccctgatccgaaacggagactggaccttccagattctggtcatgctcgaaatcacacctcaacgcggtgatatttacacttgccaggtggaacacccatcacttcagtcccccatcaccgttgaatggaggttgctccactag

SEQ ID NO: 345289 - DNA, 657 bp, Artificial Sequence
  derived and/or modified sequence
tgactgcagatccctggcggtttctgggcggcagccgtgacagtcatgctggtcatgctgtctacgcccgtggccgaggcacgggattttcccaaggattttctggtacagtttaaaggcatgtgctattttaccaacggcactgagagagtgcggggtgtggcgcgatatatttataatagggaagaatatgggaggttcgatagcgacgtgggcgagtttcaggccgtgactgagctcggtaggtcaattgaagactggaataattacaaagattttctggagcaggaacgagcagctgtggacaaggtatgccggcataactatgaagccgaactcagaaccacactgcagcggcaagtcgaaccaaccgtgaccatctcgcccagtaggactgaggcactaaaccaccataatctcttagtttgttctgttaccgatttttaccctgcccagattaaggttcaatggttcaggaatgaccaggaggagaccgccggagtggtgagcacatcactaatcaggaacggtgattggacctttcagatcttagtcatgttggagattacaccacaaaggggggacatctatacctgccaggtggagcatccttcgctacagtcaccaatcacggtggaatggaggctgttacattag

SEQ ID NO: 345290 - DNA, 657 bp, Artificial Sequence
  derived and/or modified sequence
taactccaaatccccggtgggttctgggctgcagcagttactgtgatgctcgttatgctcagcaccccagtcgccgaagcaagagacttcccgaaagattttttggtccagtttaaaggcatgtgctatttcaccaacggcaccgaacgagtgcgaggagtcgctcgatacatctacaaccgcgaagaatatggaaggtttgacagtgacgtgggagaattccaggctgtaaccgagctaggaagatcaattgaggattggaacaactacaaagactttttggagcaggaacgagccgcagttgataaagtgtgcagacataactacgaagccgaactccggacgacgctccagaggcaggtcgaacctacagttacaatctccccatctcgaacagaagctctgaaccatcataacctgcttgtgtgctccgtcactgacttctacccagcacagataaaggtgcagtggttcagaaacgatcaggaggaaaccgcaggcgtggtatccacctctctcattcgcaacggcgactggacattccagattctcgtgatgcttgaaataaccccacagcggggagacatctatacctgtcaagtcgagcacccaagcctgcagagcccaatcacagtcgagtggcgactgttgcactag

SEQ ID NO: 345291 - DNA, 657 bp, Artificial Sequence
  derived and/or modified sequence
tagctccaaatccctggcggtttctgggctgccgctgtaaccgtgatgctggtgatgctctctacacctgtggccgaagccagggactttccaaaagacttcctcgtccaattcaaaggtatgtgctattttactaacggcactgagcgggtcagaggggtcgccagatatatctataacagagaagagtacgggcgattcgatagtgacgttggggaattccaggcagtgaccgaactcggtcgaagcattgaggattggaacaattataaagactttctcgagcaggaacgcgcagctgttgacaaggtgtgtagacacaattatgaggccgagctgcgtaccacccttcagcgacaggtggagcccactgtgactatcagccctagtagaacagaagcgctgaatcaccacaacctcttagtctgctccgtgactgacttctaccctgctcaaatcaaggtccagtggttcagaaatgaccaggaggagacggcgggagtagtaagcacaagtctgataaggaatggggattggacgttccagatactggtgatgcttgagatcacacctcaacgcggagatatctatacgtgccaggttgaacatccctctttacagagccccatcaccgtggaatggcgactgctccactag

SEQ ID NO: 345292 - protein, 279 aa, Artificial Sequence
  derived and/or modified sequence
MSWKMALQIPGGFWAAAVTVMLVMLSTPVAEARDFPKDFLVQFKGMCYFTNGTERVRGVARYIYNREEYGRFDSDVGEFQAVTELGRSIEDWNNYKDFLEQERAAVDKVCRHNYEAELRTTLQRQVEPTVTISPSRTEALNHHNLLVCSVTDFYPAQIKVQWFRNDQEETAGVVSTSLIRNGDWTFQILVMLEITPQRGDIYTCQVEHPSLQSPITVEWRAQSESAQSKMLGGVGGFVLGLIFLGLGLIIRHRGQKGPRGPPPAGNISAMIQSGERAQA

SEQ ID NO: 345293 - protein, 268 aa, Artificial Sequence
  derived and/or modified sequence
MSWKMALQIPGGFWAAAVTVMLVMLSTPVAEARDFPKDFLVQFKGMCYFTNGTERVRGVARYIYNREEYGRFDSDVGEFQAVTELGRSIEDWNNYKDFLEQERAAVDKVCRHNYEAELRTTLQRQVEPTVTISPSRTEALNHHNLLVCSVTDFYPAQIKVQWFRNDQEETAGVVSTSLIRNGDWTFQILVMLEITPQRGDIYTCQVEHPSLQSPITVEWRAQSESAQSKMLGGVGGFVLGLIFLGLGLIIRHRGQKGPRGPPPAGLLH

SEQ ID NO: 345294 - protein, 275 aa, Artificial Sequence
  derived and/or modified sequence
MALQIPGGFWAAAVTVMLVMLSTPVAEARDFPKDFLVQFKGMCYFTNGTERVRGVARYIYNREEYGRFDSDVGEFQAVTELGRSIEDWNNYKDFLEQERAAVDKVCRHNYEAELRTTLQRQVEPTVTISPSRTEALNHHNLLVCSVTDFYPAQIKVQWFRNDQEETAGVVSTSLIRNGDWTFQILVMLEITPQRGDIYTCQVEHPSLQSPITVEWRAQSESAQSKMLGGVGGFVLGLIFLGLGLIIRHRGQKGPRGPPPAGNISAMIQSGERAQA

SEQ ID NO: 345295 - DNA, 840 bp, Artificial Sequence
  derived and/or modified sequence
atgagctggaagatggccctgcagatccccggcggcttctgggccgccgccgtgaccgtgatgctggtgatgctgagcacccccgtggccgaggccagagacttccccaaggacttcctggtgcagttcaagggcatgtgctacttcaccaacggcaccgagagagtgagaggcgtggccagatacatctacaacagagaggagtacggcagattcgacagcgacgtgggcgagttccaggccgtgaccgagctgggcagaagcatcgaggactggaacaactacaaggacttcctggagcaggagagagccgccgtggacaaggtgtgcagacacaactacgaggccgagctgagaaccaccctgcagagacaggtggagcccaccgtgaccatcagccccagcagaaccgaggccctgaaccaccacaacctgctggtgtgcagcgtgaccgacttctaccccgcccagatcaaggtgcagtggttcagaaacgaccaggaggagaccgccggcgtggtgagcaccagcctgatcagaaacggcgactggaccttccagatcctggtgatgctggagatcaccccccagagaggcgacatctacacctgccaggtggagcaccccagcctgcagagccccatcaccgtggagtggagagcccagagcgagagcgcccagagcaagatgctgggcggcgtgggcggcttcgtgctgggcctgatcttcctgggcctgggcctgatcatcagacacagaggccagaagggccccagaggccccccccccgccggcaacatcagcgccatgatccagagcggcgagagagcccaggcctag

SEQ ID NO: 345296 - DNA, 807 bp, Artificial Sequence
  derived and/or modified sequence
atgagctggaagatggccctgcagatccccggcggcttctgggccgccgccgtgaccgtgatgctggtgatgctgagcacccccgtggccgaggccagagacttccccaaggacttcctggtgcagttcaagggcatgtgctacttcaccaacggcaccgagagagtgagaggcgtggccagatacatctacaacagagaggagtacggcagattcgacagcgacgtgggcgagttccaggccgtgaccgagctgggcagaagcatcgaggactggaacaactacaaggacttcctggagcaggagagagccgccgtggacaaggtgtgcagacacaactacgaggccgagctgagaaccaccctgcagagacaggtggagcccaccgtgaccatcagccccagcagaaccgaggccctgaaccaccacaacctgctggtgtgcagcgtgaccgacttctaccccgcccagatcaaggtgcagtggttcagaaacgaccaggaggagaccgccggcgtggtgagcaccagcctgatcagaaacggcgactggaccttccagatcctggtgatgctggagatcaccccccagagaggcgacatctacacctgccaggtggagcaccccagcctgcagagccccatcaccgtggagtggagagcccagagcgagagcgcccagagcaagatgctgggcggcgtgggcggcttcgtgctgggcctgatcttcctgggcctgggcctgatcatcagacacagaggccagaagggccccagaggccccccccccgccggcctgctgcactag

SEQ ID NO: 345297 - DNA, 828 bp, Artificial Sequence
  derived and/or modified sequence
atggccctgcagatccccggcggcttctgggccgccgccgtgaccgtgatgctggtgatgctgagcacccccgtggccgaggccagagacttccccaaggacttcctggtgcagttcaagggcatgtgctacttcaccaacggcaccgagagagtgagaggcgtggccagatacatctacaacagagaggagtacggcagattcgacagcgacgtgggcgagttccaggccgtgaccgagctgggcagaagcatcgaggactggaacaactacaaggacttcctggagcaggagagagccgccgtggacaaggtgtgcagacacaactacgaggccgagctgagaaccaccctgcagagacaggtggagcccaccgtgaccatcagccccagcagaaccgaggccctgaaccaccacaacctgctggtgtgcagcgtgaccgacttctaccccgcccagatcaaggtgcagtggttcagaaacgaccaggaggagaccgccggcgtggtgagcaccagcctgatcagaaacggcgactggaccttccagatcctggtgatgctggagatcaccccccagagaggcgacatctacacctgccaggtggagcaccccagcctgcagagccccatcaccgtggagtggagagcccagagcgagagcgcccagagcaagatgctgggcggcgtgggcggcttcgtgctgggcctgatcttcctgggcctgggcctgatcatcagacacagaggccagaagggccccagaggccccccccccgccggcaacatcagcgccatgatccagagcggcgagagagcccaggcctag

SEQ ID NO: 345298 - DNA, 840 bp, Artificial Sequence
  derived and/or modified sequence
atgtcatggaagatggcactgcagatacccggcggcttttgggctgcagcggtgaccgtcatgctggttatgctgagcacccccgttgcggaggcccgcgattttcccaaggattttctcgtccagttcaagggaatgtgctactttaccaatggaacggagcgggtgcggggcgtggctcggtacatttacaatcgggaggaatacggtcgcttcgactccgatgtgggtgagttccaggccgtcactgaacttggtcgttcaattgaagactggaataactataaggacttcttggaacaagaaagagccgctgttgataaggtgtgtcgacacaactacgaagctgagctgcggaccacattgcagcgtcaagtggagcccaccgttacaatctcaccttcgcgtacagaggccctgaaccatcataacctcctggtgtgctccgtgactgatttctatcctgcccaaatcaaagtgcagtggtttcggaacgaccaggaagagactgctggagttgtatctaccagccttatccgaaatggtgattggacattccagatactggtgatgctcgagatcactccacagaggggagatatttacacttgccaagtggagcaccccagcctgcaatcccccatcacagtcgagtggcgggcccagtcagaaagtgcacagtcgaaaatgctgggtggggttggcgggttcgtgctaggtctgatttttctgggattgggcttaatcattaggcaccggggacagaaggggccgagggggccgcctccagccggaaatatcagtgcaatgatacagagcggcgagcgagctcaagcgtag

SEQ ID NO: 345299 - DNA, 807 bp, Artificial Sequence
  derived and/or modified sequence
atgagctggaagatggctcttcagattcctggaggcttctgggcagctgcagtcacagtgatgctagttatgctgagcacccccgtcgccgaggcccgtgacttccccaaggattttttggtccagttcaaaggcatgtgctattttactaacggaacagaacgtgtgagaggggtcgctagatacatatacaatagagaggagtatgggcgcttcgactcggacgtgggcgagtttcaggctgtgacagagctggggcggtccatcgaggactggaataattacaaggactttctcgaacaggagcgggccgctgttgacaaagtctgcagacacaactacgaggccgagctgcgtacaaccctccagaggcaggtagaaccgactgtgactattagcccttcacgaactgaggctttgaaccaccacaacctgctggtgtgttccgttacagatttttatcctgcccagataaaggtgcagtggtttcggaatgatcaggaagaaactgccggagttgtgagtacttccctgattagaaatggtgactggacattccaaatcttggtgatgctcgaaataactccccaacgcggcgatatttacacctgccaggtcgagcacccttccctccaaagcccgattactgttgaatggcgcgctcagagcgaatccgcccagagcaaaatgctgggcggcgtgggagggtttgttcttggtctcatctttcttggtttaggactaataatccgccatcgcggccaaaagggaccccgtggaccacctcccgccgggctcctgcactag

SEQ ID NO: 345300 - DNA, 840 bp, Artificial Sequence
  derived and/or modified sequence
atgtcttggaagatggccttgcagatccctggcggtttctgggccgccgccgtgacggtgatgctggttatgcttagtacacctgttgcagaagccagggacttccctaaagactttcttgtacagttcaagggtatgtgttacttcaccaacggaactgaacgcgtgcgtggcgtggccaggtatatttacaatcgagaagaatatgggcgcttcgacagcgacgtgggcgagttccaggccgtgaccgaactgggccgctcaattgaggactggaataattacaaggattttttggagcaggagcgggctgccgtggataaggtttgccggcacaattacgaggccgagttaagaaccaccctacagaggcaggtggagcccactgtcaccatttctcctagccggacggaagccctcaatcatcataacctgctggtgtgttcagtgaccgacttctacccagcccagatcaaagtacagtggttccggaatgatcaggaggagacggccggagttgtaagtacaagtctgattagaaacggagactggacattccaaattctggtcatgctggagataacaccccaacggggagatatctacacatgccaggtggaacatcctagcttacagtcccctattaccgtcgagtggcgagcacagagcgaatctgcacagagcaagatgctgggcggcgtgggcggttttgtgctcggtcttatctttctgggcttgggactcattatcagacaccggggccagaaaggtccgcgcgggccacctcctgccggcaatattagcgccatgatacaatctggcgaaagagctcaggcctag

SEQ ID NO: 345301 - DNA, 807 bp, Artificial Sequence
  derived and/or modified sequence
atgagctggaagatggcactccagattccgggaggattctgggcagccgctgtgactgtcatgctggttatgctgtccactcccgtggcagaggcccgcgattttcccaaagactttctcgtgcagttcaagggtatgtgttacttcaccaacggaacagaacgagttaggggtgttgctaggtacatatacaatcgagaagaatacgggcgtttcgactccgatgtcggggaattccaggctgtaacggagctggggaggtctattgaagattggaataactacaaagatttcctagaacaagagcgtgcagctgtcgataaggtgtgtcgtcataactatgaagccgagctgcgaaccaccctccagcgacaggtagaacccacggttactatctcaccctcaagaaccgaggctttgaaccaccacaacttacttgtatgctcagtcacggatttctatcccgcccagatcaaagtgcagtggtttcggaatgaccaagaggagacagcaggtgtcgtgtccacctcattgattcggaatggcgattggacgtttcaaatactggtgatgttggaaatcactccacagcggggagacatatacacttgtcaggtcgagcatccgagtctgcagagccccatcactgtcgaatggcgcgcgcaatccgagtcagcgcagagtaaaatgctgggcggcgtgggcggcttcgtgctgggtcttatctttctgggattgggcctgattatccgacaccgtgggcaaaagggaccacggggaccccccccggctggtctcctgcactag

SEQ ID NO: 345302 - DNA, 807 bp, Artificial Sequence
  derived and/or modified sequence
atgagctggaagatggcattacagatccctggcgggttttgggctgcggccgtgaccgttatgctggttatgcttagtaccccggtcgcggaggctagagatttccctaaagactttctggtccagtttaaggggatgtgttattttacaaacggcactgaacgggtgcgtggcgtcgcccgctatatttacaaccgagaagagtatggaagatttgatagtgatgtaggagagtttcaggccgtgactgaactggggcgcagcatagaagattggaataactacaaagatttcttagagcaggagagggccgcggtagataaggtatgccggcacaattatgaggccgagcttcggacaaccctccagcgccaggtggaacccactgtgacaattagcccatctaggactgaggcccttaatcatcataatctgctcgtatgttcagtgactgatttttatccagctcagatcaaagtgcagtggttcaggaatgaccaagaggaaaccgccggggtagtgtccacatcactcatccgtaatggcgactggacattccagatcctggtaatgctggagatcacacctcagcgaggggacatctacacatgtcaggtcgaacacccttctctgcagtctccaattacggtagaatggagagctcagtctgagtctgctcagtcgaagatgctgggcggcgtaggggggttcgttctgggccttatcttcctggggctgggcctcattataagacaccgcgggcaaaaaggtcctcgaggcccacctcccgccggactactccattag

SEQ ID NO: 345303 - DNA, 840 bp, Artificial Sequence
  derived and/or modified sequence
atgagctggaagatggccttacaaattcctggaggcttttgggccgccgctgtgaccgtgatgttggtcatgctcagcacacccgttgctgaggcacgggatttccccaaggactttctcgtgcagttcaaggggatgtgctattttacgaatgggacggagcgggttcgcggtgtggcacggtatatatacaaccgtgaagagtacggacgattcgactccgatgtcggcgagtttcaggctgtcactgaactggggcgcagcattgaggattggaacaactacaaagactttctggaacaggagagggcagccgttgataaggtgtgccgacataactatgaggccgagctgagaactacactgcagagacaagtcgagccgacagtgaccatctctcccagcagaactgaagcgctgaaccaccataatctgcttgtgtgcagcgtcacagacttttatcctgcccagatcaaggtccaatggtttcgtaatgatcaggaagagacggccggcgtggtcagcacaagtcttattagaaatggagattggaccttccagatcctggtcatgctagaaatcacaccacagcggggggacatttacacttgtcaggttgagcacccaagtctccagtcgccgattaccgttgaatggcgcgcccagtctgagtctgcccagtctaagatgttagggggcgtgggcggattcgtgcttggcctcatcttcctcggcttgggcctcatcatcaggcaccggggacagaagggcccccggggaccaccacctgccggtaacatctcagccatgatccagtctggggaacgggcccaggcttag

SEQ ID NO: 345304 - DNA, 840 bp, Artificial Sequence
  derived and/or modified sequence
atgtcctggaagatggccctgcagatacccggaggcttttgggcagcggccgtgactgtgatgctcgtgatgctatctacccccgtggccgaggcgcgcgacttcccgaaggactttctcgtccagttcaagggcatgtgttatttcaccaatggcactgaacgagtgagaggcgtggctaggtatatctacaatcgggaagagtacggccggtttgacagtgacgtaggggagttccaggcagtgaccgagctcggccgttccatagaggactggaataattataaggattttctggaacaagaaagggctgctgtcgacaaagtttgcaggcacaactacgaggctgagctgcgaactaccctgcaaagacaggtcgagcctactgtcactataagccctagtcgcactgaggccttgaatcatcacaatttgctagtgtgtagcgtgactgacttttaccctgcccagatcaaagtgcaatggttccgaaacgatcaagaggagacggcaggggtagtcagcacaagcctcattaggaatggggactggacatttcagatcttggtcatgctggagattaccccacagcggggcgatatatacacctgccaggtagagcatccttccttgcaatctccgatcaccgttgagtggagagcccagagcgagtctgcacagtcaaaaatgctgggaggcgtgggcggcttcgtattaggactgatcttcctggggctgggactgatcatccgccaccgcgggcaaaagggtccacgggggcctcccccagcaggaaatatctccgctatgatccaatctggtgagcgggctcaagcctag

SEQ ID NO: 345305 - DNA, 807 bp, Artificial Sequence
  derived and/or modified sequence
atgtcatggaaaatggcgctgcaaattccgggcggtttctgggctgctgctgtgactgtgatgcttgtgatgctctccaccccagtcgccgaagcaagagatttccccaaggactttctcgttcaattcaagggaatgtgctatttcacaaacggaaccgagagagttaggggcgtggccaggtacatctacaaccgggaggagtacggaagattcgatagtgatgtgggagagttccaggcagtgaccgagctgggccgatctatagaagactggaacaactacaaggacttcctcgagcaggagcgcgcagccgtggataaggtctgcagacataattacgaggccgaactgagaacgactctgcagagacaggtggagccgactgtgactattagtccatctaggaccgaggctttgaaccatcataatctgctggtgtgttcagtgacagacttttaccctgcccagatcaaggttcagtggtttcgtaacgaccaagaggagactgctggtgttgttagtacttccctgattaggaatggcgactggacctttcagatccttgtgatgctggagattactcctcagcgtggcgacatatatacctgtcaggtcgaacacccaagcttacagtctcccattacagtcgaatggcgagcgcaatcagagtctgcccagtcaaagatgttgggaggtgttggaggatttgtgctgggtctaatcttcctcgggttgggcttaattattcgtcacagaggtcaaaaaggtccaagaggtccaccccccgccggactactgcattag

SEQ ID NO: 345306 - DNA, 828 bp, Artificial Sequence
  derived and/or modified sequence
atggccctacagattcccggaggattctgggccgcagctgtgacagtgatgctagtcatgctgtctaccccagtagccgaggccagggacttccctaaagattttctggtgcagtttaagggaatgtgctactttaccaacggcactgaacgagtgcggggtgtggcccggtatatctataatcgcgaggaatacggcagatttgattccgacgtgggagagtttcaggctgtgacagaactcgggcggtccatcgaagattggaataactacaaggattttcttgagcaggaacgagctgccgtcgataaggtgtgccggcataattatgaagccgaactgcgaaccactctgcagcgacaggttgaacccactgtgaccatctctccaagtaggaccgaagcgctgaatcaccacaatctactagtttgttcagtcacagacttctatccagctcagatcaaggtccagtggttccgcaacgaccaagaggaaacagcaggagttgtgtcaacgtccctgatccggaacggtgactggacctttcagatattagttatgctggaaatcacaccgcagagaggagacatttatacttgtcaggtggaacatccctcgctgcaaagccccatcacagtggagtggcgtgctcagtccgaaagcgcgcagtctaagatgctgggaggtgtgggaggtttcgtcttgggcttgatcttccttggcctgggtctcatcattcgccatcggggccagaaaggtcctcgtgggcctccccctgccggcaacatatcagcaatgattcagagcggagagcgagctcaggcttag

SEQ ID NO: 345307 - DNA, 828 bp, Artificial Sequence
  derived and/or modified sequence
atggccttgcagatacccggagggttctgggcagctgctgtaaccgttatgctggttatgctcagtacaccagttgctgaggcacgcgatttcccgaaggatttcctggtgcagttcaaaggaatgtgttattttacgaacgggactgagcgtgtgcggggcgtggccaggtacatttacaatagagaggaatacgggaggttcgacagtgatgttggggaattccaggcagtgaccgagttgggacgctcgatcgaggactggaataactataaggacttcttagagcaggagcgcgcagcggtagataaggtctgtcgacataactatgaggcggagctcagaacgaccctgcagcgacaagtcgagccaacagtgaccatctccccatcccgcactgaggcgctgaatcaccacaatctgcttgtttgcagcgtcactgacttttaccccgcacaaatcaaagtccaatggtttcgaaatgaccaggaggagacagccggcgtagtaagcacatctctgattcggaacggggattggacgttccagatactggtgatgctagaaataactccccagaggggagacatctatacctgccaagtggagcacccttctctgcagagcccgattaccgtggagtggcgcgctcagtctgagagcgcgcagagcaagatgctgggcggggttggtggttttgtcctgggtctcatttttctaggtttaggccttatcatacgacatcgcggccagaaggggcctagaggaccgcctcccgccggcaatatctccgcgatgattcagagcggcgagcgcgctcaagcctag

SEQ ID NO: 345308 - DNA, 828 bp, Artificial Sequence
  derived and/or modified sequence
atggccttgcagattcccggtggattttgggccgcggctgtgacagtgatgttggtcatgctgtccacacccgtagccgaggccagagacttcccaaaggattttttggtgcagttcaagggtatgtgttacttcactaatgggactgagcgggtgcgaggtgtcgccagatatatctacaaccgggaagagtacggccgctttgatagtgatgtgggagagttccaggccgttactgaactgggacgaagcatagaggattggaataattataaggatttcttggagcaggagcgggccgcagttgacaaggtatgcaggcacaattatgaggccgagctcagaacgaccctccagaggcaggttgaaccgactgtaacaatctctccgagtcggactgaagcactgaaccatcacaatctgcttgtgtgcagtgtgaccgacttttacccagcccagatcaaggttcagtggtttagaaatgaccaggaagagacggctggagtcgtctctactagcctgatccgcaatggggactggacatttcagatattagttatgctggaaatcacccctcaacgtggcgacatttacacctgccaagtcgaacacccctccctgcagtcaccgataacagtggaatggagggcacagtccgaatccgcacagtcgaagatgttagggggggttgggggcttcgttcttggtctcatatttctcggtctaggtctgataatacgtcacaggggccaaaaggggccccgaggccctccacccgcgggtaatatatccgccatgattcaatctggcgaacgggctcaggcatag

SEQ ID NO: 345309 - DNA, 828 bp, Artificial Sequence
  derived and/or modified sequence
atggccttacagattcctggaggcttttgggcagccgcagttactgtgatgctcgtaatgctctctacgcctgtcgctgaggccagagatttcccaaaggactttctagttcagttcaaaggcatgtgctatttcacaaacgggaccgagagggtgagaggggttgccagatacatttacaatagggaggagtacggtagattcgatagtgatgttggcgagttccaggccgtgaccgagctcgggagatcaatagaagattggaataactacaaagactttctggagcaggaaagggcagcagtcgacaaagtttgtaggcacaattatgaagccgagctcaggaccactctgcagaggcaggtggagcccacggtaactatcagtccctcccggactgaagcgctgaatcaccataatttgttagtgtgttcagtaactgatttctaccccgctcaaatcaaagtgcagtggttccgaaatgatcaggaagagaccgccggggttgtcagcactagcttaatcaggaacggggattggacctttcaaatactggtgatgctagaaattaccccacagagaggggatatctacacatgccaggtggagcacccatcactgcaatcaccgatcactgtggagtggcgcgcccagtctgagagcgcacaatccaagatgcttggcggtgtgggagggttcgttctcggtctgatatttctcggactggggctcataatacgccatcgcggtcaaaagggtcctcggggcccccccccagccgggaatatctctgctatgattcaaagcggtgaacgagcccaggcttag

SEQ ID NO: 345310 - DNA, 840 bp, Artificial Sequence
  derived and/or modified sequence
atgtcctggaagatggccctgcagatccctgggggcttctgggccgctgctgtgacagtgatgctggtgatgctgagcacccctgtggccgaggcccgggacttccccaaggacttcctggtgcagttcaagggcatgtgctacttcaccaatggaacagagcgggtgcggggcgtggcccgctacatctacaaccgggaggagtatggccgctttgacagtgatgtgggggagttccaggccgtgacagagctgggccgcagcattgaggactggaacaactacaaggacttcctggagcaggagagagctgctgtggacaaggtgtgccgccacaactatgaggccgagctgcggaccaccctgcagaggcaggtggagcccaccgtgaccatcagccccagcaggacagaggccctgaaccaccacaacctgctggtgtgcagcgtgacagacttctacccagcccagatcaaggtgcagtggttcagaaatgaccaggaggagacagctggggtggtgtccaccagcctcatcagaaatggagactggaccttccagatcctggtgatgctggagatcaccccccagagaggagacatctacacctgccaggtggagcaccccagcctgcagagccccatcaccgtggagtggagggcccagagcgagagcgcccagagcaagatgctgggcggcgtgggcggctttgtgctgggcctcatcttcctgggcctgggcctcatcatccgccaccggggccagaagggcccccggggccccccacctgctggcaacatcagcgccatgatccagagcggggagcgggcccaggcctag

SEQ ID NO: 345311 - DNA, 807 bp, Artificial Sequence
  derived and/or modified sequence
atgtcctggaagatggccctgcagatccctgggggcttctgggccgctgctgtgacagtgatgctggtgatgctgagcacccctgtggccgaggcccgggacttccccaaggacttcctggtgcagttcaagggcatgtgctacttcaccaatggaacagagcgggtgcggggcgtggcccgctacatctacaaccgggaggagtatggccgctttgacagtgatgtgggggagttccaggccgtgacagagctgggccgcagcattgaggactggaacaactacaaggacttcctggagcaggagagagctgctgtggacaaggtgtgccgccacaactatgaggccgagctgcggaccaccctgcagaggcaggtggagcccaccgtgaccatcagccccagcaggacagaggccctgaaccaccacaacctgctggtgtgcagcgtgacagacttctacccagcccagatcaaggtgcagtggttcagaaatgaccaggaggagacagctggggtggtgtccaccagcctcatcagaaatggagactggaccttccagatcctggtgatgctggagatcaccccccagagaggagacatctacacctgccaggtggagcaccccagcctgcagagccccatcaccgtggagtggagggcccagagcgagagcgcccagagcaagatgctgggcggcgtgggcggctttgtgctgggcctcatcttcctgggcctgggcctcatcatccgccaccggggccagaagggcccccggggccccccacctgctggcctgctgcactag

SEQ ID NO: 345312 - DNA, 828 bp, Artificial Sequence
  derived and/or modified sequence
atggccctgcagatccctgggggcttctgggccgctgctgtgacagtgatgctggtgatgctgagcacccctgtggccgaggcccgggacttccccaaggacttcctggtgcagttcaagggcatgtgctacttcaccaatggaacagagcgggtgcggggcgtggcccgctacatctacaaccgggaggagtatggccgctttgacagtgatgtgggggagttccaggccgtgacagagctgggccgcagcattgaggactggaacaactacaaggacttcctggagcaggagagagctgctgtggacaaggtgtgccgccacaactatgaggccgagctgcggaccaccctgcagaggcaggtggagcccaccgtgaccatcagccccagcaggacagaggccctgaaccaccacaacctgctggtgtgcagcgtgacagacttctacccagcccagatcaaggtgcagtggttcagaaatgaccaggaggagacagctggggtggtgtccaccagcctcatcagaaatggagactggaccttccagatcctggtgatgctggagatcaccccccagagaggagacatctacacctgccaggtggagcaccccagcctgcagagccccatcaccgtggagtggagggcccagagcgagagcgcccagagcaagatgctgggcggcgtgggcggctttgtgctgggcctcatcttcctgggcctgggcctcatcatccgccaccggggccagaagggcccccggggccccccacctgctggcaacatcagcgccatgatccagagcggggagcgggcccaggcctag

SEQ ID NO: 345313 - DNA, 2028 bp, Artificial Sequence
  derived and/or modified sequence
attaggtttgagctgtgttgactaccactgctttttccttggtctcacttatgtcttggaagatggctctgcagatccctggaggcttttgggcagcagctgtgaccgtgatgctggtgatgctgagcaccccagtggctgaggccagagactttcccaaggatttcttggtccagtttaagggcatgtgctacttcaccaacgggacagagcgcgtgcggggtgtggccagatacatctataaccgcgaggagtacgggcgcttcgacagcgacgttggggagttccaggcggtgaccgagctggggcggagcatcgaggactggaacaactataaggacttcttggagcaggagcgggccgcggtggacaaggtgtgcagacacaactacgaggcggagctacgcacgaccttgcagcggcaagtggagcccacagtgaccatctccccatccaggacagaggccctcaaccaccacaacctgctggtctgctcagtgacagatttctatccagcccagatcaaagtccagtggtttcggaatgaccaggaggagacagccggtgttgtgtccacctccctcattaggaatggtgactggaccttccagattctggtgatgctggaaataactccccagcgtggagacatctacacctgccaagtggagcaccccagcctccagagccccatcaccgtggagtggcgggctcagtctgaatctgcccagagcaagatgctgggtggtgttggaggcttcgtgctggggctgatcttcctcgggctgggccttatcatccgtcacaggggtcagaaaggacctcgagggcctccacctgcaggtaatatttcagccatgatccagtcaggggagagggcacaggcataagagggaagagccatggtgaaaccgcatctctactaaaaatacaaaaattagctggacgtggtggtgtgcatctgtaatcccggctacttgggaggttgaggcaagagaatcacttgaacccaggaggcagaggttgcagtgagccaagatggcgccactgcactccagtctgggcgatagagctagagtctgtctcaaaaaaaaaaaaaagaagagcatgagcggagtgttccagggcacagtggtctctgttcatggcctgtttgctgctatgagggttaagacttaggggagaagtttgccagtttctacgaatctccagagattgtttcctagaaccaggccttaactttggtggcatctttttgtgaaatgtggggacagagccacatcttgaatgtgagatagtagggtgatgcccactttgtgccacattttgttagctactgcctgtaggcattttcagtgactaaaagaggctgctagtggtggagatgaagtgtcacccaatttgctaaaaaaatcaaactcttcatattacccagaagggtaactgctgttccccgacctccacatatctgcatcaagctgaagttctgtgtcctcatgagctgattttacctttacacagatattggggaacgtgatgatgatatgccctggacctcagcatcctctgtttgatgctgcagaggaaactgaggactgggggagagggtgtgtccctcagggtaccctgtgctgaccatgcctcgtctctcttctccaggactcctgcactgactcctgaggacttttgtctgggattggtcatcactcttctttaatgcccacctgcccctgcccagaattcctagctgcctgtttcaccctgtcccactgaggtcagagtcctacagtggctcatgcagccacaggtcaccttctgtgatccccaccccaaggcactggcggtgactctgcttcctgcactgacccagagcctctgcctgtgcactgcaagctgtgtctactcaggccccaaggggcatctctgtttccattctccccccacagacctgtcaagagaagcatgacaaacaaaatcatttacctgactttagtgctttttcccataattaaacctgattctgagtta

SEQ ID NO: 345314 - DNA, 2027 bp, Artificial Sequence
  derived and/or modified sequence
attaggtttgagctgtgttgactaccactgctttttccttggtctcacttacgtcttggaagatggctctgcagatccctggaggcttttgggcagcagctgtgaccgtgatgctggtgatgctgagcaccccagtggctgaggccagagactttcccaaggatttcttggtccagtttaagggcatgtgctacttcaccaacgggacagagcgcgtgcgcggtgtggccagatacatctataaccgcgaggagtacgggcgcttcgacagcgacgttggggagttccaggcggtgaccgagctggggcggagcatcgaggactggaacaactataaggacttcttggagcaggagcgggccgcggtggacaaggtgtgcagacacaactacgaggcggagctgcgcacgaccttgcagcggcaagtggagcccacagtgaccatctccccatccaggacagaggccctcaaccaccacaacctgctggtctgctcagtgacagatttctatccagcccagatcaaagtccggtggtttcggaatgaccaggaggagacagccggtgttgtgtccacctccctcattaggaatggtgactggaccttccagattctggtgatgctggaaataactccccagcgtggagacatctacacctgccaagtggagcaccccagcctccagagccccatcaccgtggagtggcgggctcagtctgaatctgcccagagcaagatgctgagtggcattggaggcttcgtgctggggctgatcttcctcgggctgggccttatcatccgtcacaggggtcagaaaggacctcgagggcctccaccagcaggtaatatttcagccatgatccagtcaggggagagggcacaggcataagagggaagagccatggtgaaaccgcatctctactaaaaatacaaaaattagctggacgtggtggtgtgcatctgtaatcccggctacttgggaggttgaggcaagagaatcacttgaacccaggaggcagaggttgcagtgagccaagatggcgccactgcactccagtctgggcgatagagctagagtctgtctcaaaaaaaaaaaaagaagagcatgagcggagtgttccagggcacagtggtctctgttcatggcctgtttgctgctatgagggttaagacttaggggaaaagtttgccagtttctacgaatctccagagattgtttcctagaaccaggccttaactttggtggcatctttttgtgaaatgtggggacagagccacatcttgaatgtgagatagtagggtgatgcccactttgtgccacattttgttagctactgcctgtaggcattttcagtgactaaaagaggctgctagtggtggagatgaagtgtcacccaatttactaaaaaaatcaaactcttcatattacccagaagggtaactgctgttcccccacctccacatatctgcatcaagctgaagttctgtgtcctcatgagctgattttacctttacacagatattggggaacgtgatgatgatatgccctggacctcagcatcctctgtttgatgctacagagggaactgaggactaggggagagggtgtgtccctcagggtaccctgtgctgatcatgcctcgtctctcttctccaggactcctgcactgactcctgaggacttttgtctgggattggtcatcactcttctgtaatgcccacctgcccctgcccagaattcctagctgcctgtgtcaccctgtcccactgaggtcagagtcctacagtggctcatgcagccacaggtcaccttctgtgatccccatcccaaggcactggtggtgactctgcttcctgcactgacccagagcctctgcctgtgcactgcaagctgtgtctactcaggccccaaggggcatctctgtttccattctccccccacagacctgtcaagagaagcatgacaaacaaaatcatttacctgactttagtgctttttcccataattaaacctgattctgagtta

SEQ ID NO: 345315 - DNA, 2027 bp, Artificial Sequence
  derived and/or modified sequence
attaggtttgagctgtgttgactaccactgctttttccttggtctcacttatgtcttggaagatggctctgcagatccctggaggcttttgggcagcagctgtgaccgtgatgctggtgatgctgagcaccccagtggctgaggccagagactttcccaaggatttcttggtccagtttaagggcatgtgctacttcaccaacgggacagagcgcgtgcggggtgtggccagatacatctataaccgcgaggagtacgggcgcttcgacagcgacgttggggagttccaggcggtgaccgagctggggcggagcatcgaggactggaacaactataaggacttcttggagcaggagcgggccgcggtggacaaggtgtgcagacacaactacgaggcggagctacgcacgaccttgcagcggcaagtggagcccacagtgaccatctccccatccaggacagaggccctcaaccaccacaacctgctggtctgctcagtgacagatttctatccagcccagatcaaagtccagtggtttcggaatgaccaggaggagacagccggtgttgtgtccacctccctcattaggaatggtgactggaccttccagattctggtgatgctggaaataactccccagcgtggagacatctacacctgccaagtggagcaccccagcctccagagccccatcaccgtggagtggcgggctcagtctgaatctgcccagagcaagatgctgggtggtgttggaggcttcgtgctggggctgatcttcctcgggctgggccttatcatccgtcacaggggtcagaaaggacctcgagggcctccacctgcaggtaatatttcagccatgatccagtcaggggagagggcacaggcataagagggaagagccatggtgaaaccgcatctctactaaaaatacaaaaattagctggacgtggtggtgtgcatctgtaatcccggctacttgggaggttgaggcaagagaatcacttgaacccaggaggcagaggttgcagtgagccaagatggcgccactgcactccagtctgggcgatagagctagagtctgtctcaaaaaaaaaaaaaagaagagcatgagcggagtgttccagggcacagtggtctctgttcatggcctgtttgctgctatgagggttaagacttaggggagaagtttgccagtttctacgaatctccagagattgtttcctagaaccaggccttaactttggtggcatctttttgtgaaatgtggggacagagccacatcttgaatgtgagatagtagggtgatgcccactttgtgccacattttgttagctactgcctgtaggcattttcagtgactaaaagaggctgctagtggtggagatgaagtgtcacccaatttactaaaaaaatcaaactcttcatattacccagaagggtaactgctgttcccccacctccacatatctgcatcaagctgaagttctgtgtcctcatgagctgattttacctttacacagatattggggaacgtgatgatgatatgccctggacctcagcatcctctgtttgatgctgcagaggaaactcaggactgggggagagggtgtgtccctcagggtaccctgtgctgatcatgcctcatctctcttctccaggactcctgcactgactcctgaggacttttgtctgggattggtcatcactcttctgtaatgcccacctgcccctgcccagaattcctagctgcctgtgtcatcctgtcccactgaggtcagagtcctacagtggctcatgcagccacaggtcaccttctgtgatccccatcccaaggcactggcggtgactctgcttcctgcactgacccagagcctctgcctgtgcactgcaagctgtgtctactcaggccccaaggggcatctctgtttccattctccccccacagacctgtcaagagaagcatgacaaacaaaatcatttacctaactttagtgctttttcccataattaaacctgattctgagtt

SEQ ID NO: 345316 - DNA, 2026 bp, Artificial Sequence
  derived and/or modified sequence
attaggtttgagctgtgttgactaccactgctttttccttggtctcacttacgtcttggaagatggctctgcagatccctggaggcttttgggcagcagctgtgaccgtgatgctggtgatgctgagcaccccagtggctgaggccagagactttcccaaggatttcttggtccagtttaagggcatgtgctacttcaccaacgggacagagcgcgtgcgcggtgtggccagatacatctataaccgcgaggagtacgggcgcttcgacagcgacgttggggagttccaggcggtgaccgagctggggcggagcatcgaggactggaacaactataaggacttcttggagcaggagcgggccgcggtggacaaggtgtgcagacacaactacgaggcggagctgcgcacgaccttgcagcggcaagtggagcccacagtgaccatctccccatccaggacagaggccctcaaccaccacaacctgctggtctgctcggtgacagatttctatccagcccagatcaaagtccggtggtttcggaatgaccaggaggagacagccggtgttgtgtccacctccctcattaggaatggtgactggaccttccagattctggtgatgctggaaataactccccagcgtggagacatctacacctgccaagtggagcaccccagcctccagagccccatcaccgtggagtggcgggctcagtctgaatctgcccagagcaagatgctgagtggcattggaggcttcgtgctggggctgatcttcctcgggctgggccttatcatccgtcacaggggtcagaaaggacctcgagggcctccaccagcaggtaatatttcagccatgatccagtcaggggagagggcacaggcataagagggaagagccatggtgaaaccgcatctctactaaaaatacaaaaattagctggacgtggtggtgtgcatctgtaatcccggctacttgggaggttgaggcaagagaatcacttgaacccaggaggcagaggttgcagtgagccaagatggcgccactgcactccagtctgggcgatagagctagagtctgtctcaaaaaaaaaaaagaagagcatgagcggagtgttccagggcacagtggtctctgttcatggcctgtttgctgctatgagggttaagacttaggggaaaagtttgccagtttctacgaatctccagagattgtttcctagaaccaggccttaactttggtggcatctttttgtgaaatgtggggacagagccacatcttgaatgtgagatagtagggtgatgcccactttgtgccacattttgttagctactgcctgtaggcattttcagtgactaaaagaggctgctagtggtggagatgaagtgtcacccaatttactaaaaaaatcaaactcttcatattacccagaagggtaactgctgttcccccacctccacatatctgcatcaagctgaagttctgtgtcctcatgagctgattttacctttacacagatattggggaacgtgatgatgatatgccctggacctcagcatcctctgtttgatgctacagagggaactgaggactaggggagagggtgtgtccctcagggtaccctgtgctgatcatgcctcgtctctcttctccaggactcctgcactgactcctgaggacttttgtctgggattggtcatcactcttctgtaatgcccacctgcccctgcccagaattcctagctgcctgtgtcaccctgtcccactgaggtcagagtcctacagtggctcatgcagccacaggtcaccttctgtgatccccatcccaaggcactggtggtgactctgcttcctgcactgacccagagcctctgcctgtgcactgcaagctgtgtctactcaggccccaaggggcatctctgtttccattctccccccacagacctgtcaagagaagcatgacaaacaaaatcatttacctgactttagtgctttttcccataattaaacctgattctgagtta

SEQ ID NO: 345317 - DNA, 2027 bp, Artificial Sequence
  derived and/or modified sequence
attaggtttgagctgtgttgactaccactgctttttccttggtctcacttatgtcttggaagatggctctgcagatccctggaggcttttgggcagcagctgtgaccgtgatgctggtgatgctgagcaccccagtggctgaggccagagactttcccaaggatttcttggtccagtttaagggcatgtgctacttcaccaacgggacagagcgcgtgcggggtgtggccagatacatctataaccgcgaggagtacgggcgcttcgacagcgacgttggggagttccaggcggtgaccgagctggggcggagcatcgaggactggaacaactataaggacttcttggagcaggagcgggccgcggtggacaaggtgtgcagacacaactacgaggcggagctacgcacgaccttgcagcggcaagtggagcccacagtgaccatctccccatccaggacagaggccctcaaccaccacaacctgctggtctgctcagtgacagatttctatccagcccagatcaaagtccagtggtttcggaatgaccaggaggagacagccggtgttgtgtccacctccctcattaggaatggtgactggaccttccagattctggtgatgctggaaataactccccagcgtggagacatctacacctgccaagtggagcaccccagcctccagagccccatcaccgtggagtggcgggctcagtctgaatctgcccagagcaagatgctgggtggtgttggaggcttcgtgctggggctgatcttcctcgggctgggccttatcatccgtcacaggggtcagaaaggacctcgagggcctccacctgcaggtaatatttcagccatgatccagtcaggggagagggcacaggcataagagggaagagccatggtgaaaccgcatctctactaaaaatacaaaaattagctggacgtggtggtgtgcatctgtaatcccggctacttgggaggttgaggcaagagaatcacttgaacccaggaggcagaggttgcagtgagccaagatggcgccactgcactccagtctgggcgatagagctagagtctgtctcaaaaaaaaaaaaaagaagagcatgagcggagtgttccagggcacagtggtctctgttcatggcctgtttgctgctatgagggttaagacttaggggagaagtttgccagtttctacgaatctccagagattgtttcctagaaccaggccttaactttggtggcatctttttgtgaaatgtggggacagagccacatcttgaatgtgagatagtagggtgatgcccactttgtgccacattttgttagctactgcctgtaggcattttcagtgactaaaagaggctgctagtggtggagatgaagtgtcacccaatttgctaaaaaaatcaaactcttcatattacccagaagggtaactgctgttccccgacctccacatatctgcatcaagctgaagttctgtgtcctcatgagctgattttacctttacacagatattggggaacgtgatgatgatatgccctggacctcagcatcctctgtttgatgctgcagaggaaactgaggactgggggagagggtgtgtccctcagggtaccctgtgctgaccatgcctcgtctctcttctccaggactcctgcactgactcctgaggacttttgtctgggattggtcatcactcttctttaatgcccacctgcccctgcccagaattcctagctgcctgtttcaccctgtcccactgaggtcagagtcctacagtggctcatgcagccacaggtcaccttctgtgatccccaccccaaggcactggcggtgactctgcttcctgcactgacccagagcctctgcctgtgcactgcaagctgtgtctactcaggccccaaggggcatctctgtttccattctccccccacagacctgtcaagagaagcatgacaaacaaaatcatttacctgactttagtgctttttcccataattaaacctgattctgagtt

SEQ ID NO: 345318 - DNA, 840 bp, Artificial Sequence
  derived and/or modified sequence
atgagctggaagatggccctgcagatccccggcggcttctgggccgccgccgtgacggtgatgcttgtgatgctgtccactcctgtggccgaagcccgagacttccctaaggacttccttgttcagttcaagggaatgtgctatttcaccaacggtacagaaagggtgagaggggtagctcgatacatttacaatcgggaagaatatggcagatttgattctgacgtgggggagttccaggctgtgactgaactgggccggagcatcgaggactggaacaactataaggacttcctggagcaggaacgagccgcggtggataaggtctgcaggcacaactacgaagccgaattaagaaccacacttcagcgccaggtcgaaccaactgtcactatatcccctagcagaacagaggcacttaatcatcataatctgctcgtgtgcagcgtcactgacttttacccagcacagatcaaggtgcaatggtttaggaacgaccaggaagagacagctggggtagtttcaacgagcttgattagaaacggggattggacgttccagatcttggttatgctcgaaataactccccagcgaggcgacatatacacgtgccaggtggagcaccccagcttgcagtcaccgatcacagtcgaatggagagcccagagtgaatctgctcagtcaaagatgcttggtggagtgggtggctttgtgctcgggttgatctttcttggcttaggacttataattaggcatagaggccaaaaaggtccccgcggtccaccacctgctggaaacatatctgccatgattcagtctggggaacgagctcaagcatag

SEQ ID NO: 345319 - DNA, 807 bp, Artificial Sequence
  derived and/or modified sequence
atgagctggaagatggccctgcagatccccggcggcttctgggccgccgccgtgaccgtgatgcttgtaatgttgtcaacaccggtcgccgaggcacgagattttcctaaagattttctggtgcagttcaaaggaatgtgctacttcactaatggcaccgagagggtgcggggcgtggctaggtacatctacaaccgagaggagtatggtcgcttcgactccgacgtgggagaattccaggccgtcactgaactcggccgatccatcgaggactggaacaactataaagactttctggagcaagagcgagcagcggtcgataaggtgtgcagacacaactacgaagctgaactgagaaccacgctgcagagacaagtggaaccaaccgtgacgatcagcccaagtagaacagaagctctcaatcatcataatctcttggtttgttctgtgacagacttctaccccgcgcagattaaagttcagtggtttcggaatgatcaggaggaaaccgcgggagtggtctctacctccctgatacgcaatggagattggacctttcagatactggtgatgttggaaattactcctcaacgtggtgacatatatacatgccaggtggagcatccttccttgcagtcccctattaccgtggagtggagggcccagtcagagtccgcccagagcaagatgctcgggggggtcggtgggtttgtccttggccttatctttctgggcctgggcctgatcatccgccaccgggggcagaaaggacctcgcggcccccccccagcagggctgctgcattag

SEQ ID NO: 345320 - DNA, 840 bp, Artificial Sequence
  derived and/or modified sequence
atgagctggaagatggccctgcagatccccggcggcttctgggccgctgccgttaccgtcatgctggtcatgttaagcactcctgtggctgaggccagggatttcccgaaggatttccttgtccagttcaaggggatgtgctatttcaccaatggaacggaaagggtcagaggagtggccaggtacatttataatcgagaagagtatggccgatttgatagcgacgtcggtgaatttcaggctgtcaccgaattggggagaagcatagaggattggaacaattacaaggatttcttggagcaggaacgggccgccgtggacaaagtgtgtcgccacaattacgaagcagaacttcggacaactttacagagacaggtggagcccaccgtgactattagcccgagcagaacggaggccctcaatcaccacaatctgctcgtgtgtagtgttaccgatttctatccagctcagattaaggtgcagtggtttaggaacgaccaggaggagacagccggagtggtgagtacatctctcattagaaatggtgattggacatttcaaatactggtcatgctggaaatcaccccccagcgcggcgacatatatacatgtcaagtcgaacatcccagtctgcagagcccgatcaccgtagaatggagagcccagtctgagagcgcccagagcaaaatgttaggtggcgttgggggtttcgtacttgggctgatatttctgggcctgggccttataattcgccaccgcgggcagaaaggaccacgcggtccccctccagcgggtaatatctcagcgatgattcagtcaggggagcgtgcgcaggcctag

SEQ ID NO: 345321 - DNA, 807 bp, Artificial Sequence
  derived and/or modified sequence
atgagctggaagatggccctgcagatccccggcggcttctgggccgccgccgtgaccgtcatgctggttatgctttctacgcctgtggcagaagcccgcgatttcccgaaagacttcttagtccagtttaaggggatgtgttattttaccaacggcaccgagcgggttaggggggtggcacgatacatctacaatcgggaagagtacgggaggtttgattcggacgtcggcgagtttcaggcggtcactgagctgggtcggtctatagaggactggaataactacaaggattttcttgagcaagagcgtgctgccgtggataaagtgtgccgccataattacgaggcggagctccgtacaactctgcaacgtcaggtcgagccaacggtgaccattagcccctccaggactgaggccctcaaccaccacaacttactggtctgcagcgtgaccgatttctatcccgcacagatcaaggtgcagtggttcagaaatgaccaagaggaaacggccggtgtagtgagcaccagtctgatccgaaacggcgactggaccttccaaatactggttatgctggagataacccctcaaagaggcgatatttacacttgccaggtcgaacacccttctcttcagagtcctattactgtagagtggcgcgcccaatccgagtccgcacagagtaaaatgctgggcggagttggcgggttcgttctggggctcatcttcctgggcctaggcctcattataagacaccgaggtcaaaagggaccccgagggccgccccccgccggccttttacactag

SEQ ID NO: 345322 - DNA, 807 bp, Artificial Sequence
  derived and/or modified sequence
atgagctggaagatggccctgcagatccccggcggcttctgggccgccgctgtaaccgtcatgctggtgatgctgtccacacccgtcgccgaagcccgcgacttccccaaggactttctcgttcagtttaaaggtatgtgttacttcaccaacggaacggaacgggtgcggggagtcgcaaggtatatctataatcgtgaagaatacgggcgtttcgatagcgacgtaggtgagtttcaggccgtgacagagttgggccgcagcattgaggactggaataactacaaggatttcctggagcaggaacgggctgccgtcgataaggtctgccgacacaactacgaagccgagctaagaacaaccctgcagagacaggtggagcccaccgtgactatctccccttcacgtactgaagcccttaaccatcataaccttctcgtttgcagcgtgaccgatttttatccagcacagataaaagtgcagtggtttagaaacgatcaggaagagacagctggcgtggttagcacatccctgatccgtaatggcgattggacatttcagattctcgtgatgcttgaaatcactccacagcgaggagatatctacacgtgtcaggttgagcacccctctttgcagagccctatcacagtcgagtggcgcgcacagagcgagtctgcccagagcaaaatgctaggcggtgtaggagggttcgtcctgggtctgatattcctgggtctcgggctgattatcagacatcgaggacagaaaggacctcgcggtccacctcctgccggccttctgcattag

SEQ ID NO: 345323 - DNA, 840 bp, Artificial Sequence
  derived and/or modified sequence
atgagctggaagatggccctgcagatccccggcggcttctgggccgctgccgtgaccgtaatgctggtgatgctctccacccctgtggccgaggcgcgggactttccaaaggattttcttgtgcaatttaagggaatgtgttatttcactaacggaactgaacgtgttaggggggtcgcccgttacatctacaaccgcgaggaatatggaagattcgactcagatgtcggggagttccaagccgtgaccgagctcggacggtccattgaagactggaacaactataaggattttctcgaacaagaacgagccgctgtcgacaaggtatgcagacacaattacgaggcggagctgaggaccacactgcagaggcaggtcgagcccactgtgaccatctctcccagtcggacggaggccctgaaccatcataacctcctggtgtgcagcgtgaccgatttctatcctgcacagattaaggtccagtggtttcggaacgatcaagaggagacagctggggtggtcagtacctcgctcatccggaatggtgattggacttttcagattctggttatgctggagattacccctcagagaggcgatatttacacatgtcaggttgagcacccctctctgcagtctccgattacggtggaatggcgggctcagtctgagtcagcacaaagcaagatgctcgggggcgttggagggtttgtactcggtctaatctttctgggattgggtctcatcattagacaccgcggccagaagggaccccgtggccccccgccagctggaaatataagtgcaatgattcagagtggagagcgagcccaggcttag

SEQ ID NO: 345324 - DNA, 840 bp, Artificial Sequence
  derived and/or modified sequence
atgagctggaagatggccctgcagatccccggcggcttctgggccgccgccgtgacagttatgttggttatgctgagcactcccgttgccgaggcccgagatttccccaaggattttttggttcagtttaaaggcatgtgttattttacaaacggcacagaacgcgtgcgtggcgtggcccggtacatctataatagggaagagtacggtagatttgactccgatgtgggcgagttccaagctgtcaccgaactgggaaggagtatcgaggactggaataattacaaggactttttggagcaagagagagctgctgtggacaaggtctgtaggcacaactacgaggctgagctgcgcaccactctgcagcgccaggttgaaccaacggttacaatttccccatccagaacggaggccctgaatcaccacaacttgctggtctgcagtgttaccgacttttaccctgcccagatcaaagtccaatggttccgcaacgaccaagaggagactgctggagtcgtaagcacctcacttattaggaacggagattggactttccagattcttgtgatgctggagataacacctcagcgcggagatatttacacttgtcaggtggagcacccctctctgcagagtcccattaccgttgaatggcgtgcccagtctgagtccgcccagtccaaaatgcttggaggcgttggaggttttgtgttggggctcatcttcctagggcttgggctgatcatccgccacaggggacagaaggggccacgcggacccccgcccgctggtaacattagtgctatgattcaatccggtgagagggctcaggcctag

SEQ ID NO: 345325 - DNA, 807 bp, Artificial Sequence
  derived and/or modified sequence
atgagctggaagatggccctgcagatccccggcggcttctgggccgccgctgtcaccgtgatgctcgtgatgctttccactcccgtggccgaagctagagattttccgaaggactttctggtccagttcaaggggatgtgctatttcacaaacggaacagagcgtgtgcggggggtcgcaagatatatctacaatagggaagaatacggaagattcgactccgatgtgggcgaattccaagctgtcacagaactgggacgttctattgaagattggaacaattacaaggatttcttagaacaggagcgggcagctgtcgacaaggtgtgccgccataactacgaagcggaactcaggaccacactgcagcggcaggtcgagccgactgtaactatcagtccttcgaggaccgaggccctcaaccatcacaacttactggtgtgctccgtgacagatttctatcccgcccagataaaggtacagtggttccgcaatgatcaggaggaaacggccggtgtagtttccacaagcctgattcgaaacggcgattggacattccagatacttgtcatgttggagatcaccccccagaggggggacatctatacctgtcaggtggagcaccccagtttgcagagtcctatcactgtagaatggcgtgctcagtccgaatccgcacaatctaagatgctgggcggcgtgggcggcttcgttctgggactgatttttctgggcctaggactgataatccgccatcgtggacaaaaagggccgcggggtcctccaccggctgggctgctgcattag

SEQ ID NO: 345326 - DNA, 828 bp, Artificial Sequence
  derived and/or modified sequence
atggccctgcagatccccggcggcttctgggccgccgccgtgaccgtgatgcttgtcatgttgagcacccccgtcgccgaggcgcgggactttcctaaggattttctggtgcaattcaaaggaatgtgttacttcacaaatggcaccgaacgagtcaggggtgtggccaggtacatttataatcgggaggagtacggaagatttgattccgacgtgggagagtttcaggctgtgacagaactcggacgctctatcgaagactggaacaactacaaagacttcctggaacaggaacgggccgccgtggataaggtatgcaggcacaattacgaggcggagctgcgcacgacgctgcaacgccaggttgaacctaccgtgaccatcagcccctcaagaacagaggcccttaaccaccataacctcctcgtctgtagcgtgaccgacttttatccagcccagataaaagtgcaatggtttcggaacgatcaggaggaaacggctggggtggtcagtacgagcctgatcaggaatggcgactggacgttccaaatcttggtgatgcttgaaatcactcctcagcggggtgacatctacacctgccaggtggagcatccatcattgcagagccccattacagtggagtggcgcgcccagtctgagtcggctcaatcaaaaatgctcggtggagtcggaggatttgtgctcggtctcattttcctgggacttgggctgatcataaggcaccgcgggcagaagggcccccgcggtcctccaccagctggaaatatctctgcgatgatccaatccggagagcgcgcccaagcctag

SEQ ID NO: 345327 - DNA, 828 bp, Artificial Sequence
  derived and/or modified sequence
atggccctgcagatccccggcggcttctgggccgccgccgtgaccgtgatgctcgttatgctgtcaaccccagtcgcagaagccagagatttccctaaggatttcctagttcagttcaaggggatgtgctactttacaaacggcactgagagagtgagaggtgtagctaggtatatctataaccgggaagagtatggtcgatttgattcggacgtcggggaatttcaggcggtgaccgagttaggccgaagcatcgaggactggaataactacaaagacttcctggagcaagaaagagctgccgttgacaaggtctgtaggcacaactacgaagcagagctccgaacaacactgcagcggcaagtcgaaccaactgtgacaattagtccctcgcgcaccgaggctcttaatcaccataatctactggtatgttccgtaactgacttttatccagcccagattaaggtccagtggtttcgaaatgatcaggaagaaaccgccggggtggtgtcgacttcacttatacgtaatggcgactggacgtttcagattctggtcatgctagaaatcactccccaacgaggcgacatttacacttgtcaggtggagcacccgtctctgcagtcccccatcactgttgagtggcgggctcagagcgagagcgctcaatctaaaatgctgggcggcgtgggaggcttcgtgctgggcttgattttcttaggacttggccttatcattcggcatcgtgggcagaaaggacccagaggacctccccctgcgggaaacatttccgcaatgatacagtccggagaacgcgctcaggcctag

SEQ ID NO: 345328 - DNA, 828 bp, Artificial Sequence
  derived and/or modified sequence
atggccctgcagatccccggcggcttctgggccgccgccgtgaccgttatgttggttatgctgtcgacaccagtggcggaagcacgcgactttccaaaagattttttagtacagttcaagggtatgtgctattttaccaatgggacagaaagagtccggggagtagcgaggtacatttataatcgggaagaatacggacggttcgacagtgatgtcggagaattccaagcagtgaccgagctcggacggagtatcgaggattggaacaactataaggacttcttggagcaggagcgggcggccgtcgataaggtctgccggcacaattacgaggcagaattacgcactacgctgcagcgtcaggtggagcccacagttacgatatccccctcgagaactgaggccctgaatcatcataatctactcgtgtgctcagtgaccgatttttaccccgcacaaataaaagtacagtggtttaggaatgaccaagaggagaccgctggagtcgtgtctactagtctgatcaggaacggtgattggaccttccagatcttagtaatgctggagattactccccaacgtggggacatatacacgtgtcaagtcgaacacccctccctgcagtctcctattaccgtagagtggagagcccaaagtgaatctgctcagagtaaaatgctgggaggcgtgggaggttttgtgctcggcctgatattcctgggcctgggcctgatcatacgtcataggggacagaaaggtccccgcggcccgcccccggccgggaacatctcggcgatgattcagtccggggagagggctcaggcctag

SEQ ID NO: 345329 - DNA, 828 bp, Artificial Sequence
  derived and/or modified sequence
atggccctgcagatccccggcggcttctgggccgccgccgtgaccgtcatgttggtgatgctctcaaccccagtggccgaggcaagggattttccgaaggacttcctggtgcagttcaagggcatgtgttacttcacaaacggaacagaacgcgtgaggggcgtggcgcggtacatttacaaccgggaggagtatgggagattcgactctgacgtgggcgaatttcaagccgtgacggaattagggcgatccattgaagattggaacaattataaagacttccttgagcaggagcgcgccgctgtagacaaggtgtgtaggcataactacgaggctgagctccgcactacattacaaaggcaggtggaacccactgtgaccatttcccccagccgaacagaggccctaaaccaccacaacttgttagtttgttcagttaccgatttctatccggcccagatcaaggtccagtggtttaggaacgaccaggaggaaacagctggagtcgtcagcaccagcctgatccgcaatggggactggacgttccaaattctggtgatgctggagattactccgcagcgaggcgatatatacacttgtcaagttgaacatccttctctgcagagccccattacagtagaatggagggcacagtctgagagtgctcaaagtaagatgttgggcggggtgggcggtttcgtgctcggcctgatcttcctcggcctgggccttattatcagacaccgagggcagaaagggccccggggcccgcctcccgcaggaaacatctcagctatgattcaatctggggagcgagcacaggcatag

SEQ ID NO: 345330 - DNA, 840 bp, Artificial Sequence
  derived and/or modified sequence
atgagctggaagatggccctacaaattccagggggattttgggctgcagctgtcacagtgatgcttgtgatgctcagtacaccagtcgctgaggctagagacttcccaaaagatttccttgtgcagtttaaaggcatgtgctattttaccaacgggacagaaagggttaggggagtggcaagatatatttacaacagagaggaatatggacggtttgattcagatgtgggtgaatttcaggccgtcacagagctgggacgatccattgaggattggaacaattacaaagatttcctggagcaggagcgcgcagcggtggacaaggtctgcagacacaattatgaggctgaactgagaaccaccctccaacggcaggtggaaccgacggtcaccattagtccttcccgcaccgaggctctgaaccaccacaatctgctagtatgtagtgtcacggacttttatcctgcccagatcaaggtacagtggtttaggaacgaccaagaagagaccgcaggcgtagtgtccaccagtctgatccggaacggagactggacgtttcagatccttgtcatgttagaaatcacccctcagcgaggcgacatctacacgtgccaggtggaacatcccagtcttcagtctcccattaccgtggaatggagagcgcagagcgagtccgcccagagtaagatgctcggcggagtgggcggatttgtcctcggactgatatttctcggtctgggtctgatcatccgccatcgaggtcagaagggaccccgtgggcctcctcccgctggtaatatcagcgccatgatacagagtggggagcgcgctcaggcctag

SEQ ID NO: 345331 - DNA, 807 bp, Artificial Sequence
  derived and/or modified sequence
atgagctggaagatggcgctgcaaatacccggtgggttctgggccgcagctgtgacagtcatgttggtcatgttaagcactcctgtggctgaggccagggatttcccaaaggactttcttgtccagtttaagggtatgtgctatttcactaacggcacagaacgggtgcgcggtgtcgctcgatatatctacaatcgggaggagtatgggcgatttgactccgacgtcggcgagttccaggccgtgactgagctgggacgctcaatcgaggattggaataattataaggacttcttggagcaggagcgggcagccgttgataaggtgtgtcggcacaattatgaagctgaactcagaaccactctccagcggcaggtcgagcccactgtcaccatctctcccagccgtaccgaagcactcaaccaccacaatctgctggtatgttccgtgacggacttttaccccgctcagattaaggtccagtggttccgaaatgatcaggaggagacagcaggagttgtttctactagcttgatcaggaacggcgactggacctttcagatcctggtgatgttagagattacgccccagagaggtgacatttatacttgtcaagtggaacaccccagccttcagtcacctatcaccgtcgagtggagagcccagagcgaaagcgctcagtccaaaatgttagggggagtcggcggattcgttttagggctgatcttcctaggcctcggtcttattatcaggcaccggggacagaaagggccacgcggaccccctcccgctggactgttgcactag

SEQ ID NO: 345332 - DNA, 840 bp, Artificial Sequence
  derived and/or modified sequence
atgtcctggaaaatggccctgcaaatacctggaggattctgggctgccgctgttactgtaatgttagtgatgctctccacccctgttgcagaggccagggactttcctaaagactttcttgtccagttcaaggggatgtgctacttcactaacggaacggaaagggtgcggggagttgccaggtacatctataatagagaagagtatggcagattcgactctgatgtgggagaattccaggccgtgaccgaacttgggaggagcattgaagactggaataattataaagacttcctggaacaggaacgcgctgccgtggacaaagtgtgtcggcacaattatgaggccgaacttagaaccactctgcagcggcaggtggagcctacggtaactatcagtccaagtagaaccgaagccctgaaccaccacaacttgctggtttgtagcgtcacagatttttacccggctcagatcaaagtgcagtggttccgcaacgaccaggaagagacagccggagttgtttccacatccttaatcagaaatggtgattggacctttcagatccttgtaatgctcgaaattacgcctcagcgcggagacatctacacatgccaggtggaacatccttcattacaaagccctatcacagtcgaatggagagcccagtcagaaagcgcacagtccaagatgctcggcggtgttggcggattcgtcttggggctgatttttttggggctcgggcttatcattagacatcgaggacagaaagggccacgtggccctccacccgcaggcaacatttccgctatgattcaatccggagagcgggctcaggcctag

SEQ ID NO: 345333 - DNA, 807 bp, Artificial Sequence
  derived and/or modified sequence
atgtcatggaaaatggcccttcagattcctggaggattctgggctgctgcggtgaccgtaatgctcgttatgctctcaacaccagtggcagaggcaagggactttcccaaggacttcttggttcaattcaaggggatgtgttattttactaacgggacagagagggtccgcggtgtcgcacgatatatttacaatagagaagagtatggcagattcgactctgacgttggcgagttccaggctgtcacagagctggggcgttccattgaagattggaacaattacaaagactttctggaacaggagagggccgcagtggacaaggtctgtcgtcataactacgaagccgagctgagaactacgctccagcgacaggtggaaccgactgtgactatttcaccgtctcgcaccgaggctttgaaccatcacaacctcctggtgtgcagtgtcacggatttctaccccgcacagattaaggtccagtggttccgaaatgatcaggaagaaactgccggtgtcgtttcgaccagcctgattaggaacggggattggacatttcagatattggtgatgttagagattactcctcagcggggtgatatttacacctgccaggtcgaacacccgtctctgcaatcaccaattaccgtggaatggagggcccaatcagaatcagcccaatctaagatgctcgggggtgtcggagggtttgtgctgggcttgatctttctgggcctgggtctgatcattcgacatcgaggccagaaggggccacggggaccccctcccgcaggattgctacattag

SEQ ID NO: 345334 - DNA, 807 bp, Artificial Sequence
  derived and/or modified sequence
atgtcctggaaaatggctcttcagattcccggagggttttgggctgcagctgtgacagtcatgcttgtgatgctgagtacccccgtggccgaggcacgggatttccctaaagatttccttgtacagtttaaaggaatgtgctacttcacaaacgggacagaacgcgtgcgcggagtggcccgatacatctacaaccgagaggagtatggcaggttcgatagcgatgtaggtgagttccaggcagttactgagctcgggaggtccattgaagattggaacaactacaaggattttctcgagcaggagcgcgctgctgtggataaggtatgccggcataattacgaggccgaattgaggactactctccagagacaggtagagcccactgttacaatttccccttcaaggacagaggctctgaatcatcataaccttctcgtttgtagcgtgactgacttctaccctgcccagatcaaagtccaatggttccggaacgatcaggaggaaaccgcaggcgtcgtttccaccagcttgatccggaacggcgactggacctttcagatcctggttatgcttgagataactcctcagcgtggggacatttatacgtgccaagtcgagcaccctagcctccagtcccctattaccgttgaatggagggcacagagcgagtctgcgcagtccaagatgctcgggggagtcggtggttttgtgcttggcctgatattcctggggttggggctcatcattcgccacagagggcagaaagggccacggggaccgccacccgcagggctgctccattag

SEQ ID NO: 345335 - DNA, 840 bp, Artificial Sequence
  derived and/or modified sequence
atgagctggaagatggccctccaaatacccggaggcttctgggctgctgctgtgacggtcatgctcgtaatgttgagcacacctgtcgcagaggcaagggattttcctaaagattttctcgtgcaatttaaaggcatgtgttacttcaccaatgggactgaacgcgtcaggggtgtagccaggtatatctacaatcgtgaagagtacggtagatttgatagcgacgtgggagagttccaggccgtcactgaacttggcaggtccatcgaagactggaacaattataaagactttctcgaacaggaacgagccgctgttgacaaagtgtgccgccacaactatgaagccgagcttcgcactacactgcagagacaggtcgagcccactgtgactatctctcccagcaggacagaagctctcaaccatcataatctacttgtgtgcagtgtgaccgacttctatcctgcccagatcaaagtgcagtggttcaggaacgatcaagaagagactgctggagtcgtcagcacttctctgattcgaaacggcgattggacattccagattctggtgatgctggaaattaccccccagcgcggagacatatacacatgccaggtcgagcaccccagccttcagtcaccgattacagttgagtggcgcgctcaaagtgagtccgcccagtcaaagatgctcggcggagtgggcggttttgtgctggggctcatcttcctaggcctgggtctgattatccgacatcgcggacagaaaggtcccaggggcccaccccctgccggaaacatctcagcaatgatacagtcaggagagcgcgctcaggcctag

SEQ ID NO: 345336 - DNA, 840 bp, Artificial Sequence
  derived and/or modified sequence
atgtcgtggaaaatggccctgcagatacctggcggtttttgggcagctgcggtgacggtgatgttagtgatgctgtcaacacctgttgccgaggccagggactttccaaaggacttcctggtgcagtttaagggcatgtgctacttcacgaacggcacagaacgggtgcggggtgttgctcgttacatttataacagggaagagtacggcaggttcgacagcgacgtgggagagtttcaagcagtgacggaactggggagaagcatagaggactggaacaactacaaagacttcttggagcaggagcgggcagccgtggacaaggtctgccggcacaattacgaagccgaactccgtaccacactccaacgtcaggtggagccgaccgtcactatttccccgagcaggaccgaagcgctcaaccaccataacctccttgtgtgctcagttactgacttttaccctgctcagattaaagttcagtggtttaggaacgatcaagaggagactgccggagtggtctccacgagcctcattcggaacggggactggactttccagatcctcgttatgttagagattacacctcaaaggggcgacatatacacatgccaagtcgaacacccttcgctacaatcacccattaccgtggaatggagagcccagtccgaatccgcacaaagtaaaatgttggggggagtggggggtttcgtccttggactgatattcctcggtctcgggctcattatccggcatagaggccagaaagggcctagagggcctcccccagccggtaatataagcgctatgattcagtcgggggagcgggctcaggcctag

SEQ ID NO: 345337 - DNA, 807 bp, Artificial Sequence
  derived and/or modified sequence
atgagttggaagatggcacttcagatccccggtggtttttgggccgctgccgttaccgtcatgcttgtaatgctgtcaactccagtagcagaagccagggacttccccaaggactttcttgtgcagttcaaagggatgtgctacttcactaacgggaccgagagggtcagaggcgttgcacgctatatctataaccgcgaagaatatggcaggtttgacagcgacgtcggggaattccaggcggtgaccgagctcggtcgctctatcgaagactggaataattataaggacttccttgaacaggaacgcgctgcagtagataaggtttgtcgccacaactacgaggccgaacttagaacaacattgcagaggcaggtggagcctaccgttaccatctctccttctagaactgaggctctgaatcaccataacttactggtgtgcagcgtgaccgacttttatccagctcagatcaaagtgcagtggttccgaaacgaccaggaggagacagcaggcgttgtaagcaccagtctgattagaaacggcgactggactttccagatcctggtcatgctcgaaattacacctcagaggggagacatatatacctgccaggtggaacatcctagcttgcagagccctatcacagtggagtggcgagcacaaagcgaatctgcccagtccaaaatgctaggaggggtggggggttttgtacttggcttaatctttctgggcctagggctgatcattcggcatcgtggccaaaaaggcccacgaggccctccccctgcaggccttttacattag

SEQ ID NO: 345338 - DNA, 828 bp, Artificial Sequence
  derived and/or modified sequence
atggcgctccagatccctggtggattctgggccgctgccgttaccgtgatgttggtgatgttaagcacaccagtagctgaggccagagactttcccaaggacttcctggttcagtttaaaggtatgtgttactttaccaacggtacggagagagtgagaggtgtggcaaggtatatctacaatcgggaggaatacggtaggtttgattccgatgttggggagttccaagccgtgaccgagctggggcgatctatagaggactggaacaattacaaggatttccttgagcaggagagagctgctgttgacaaggtctgcaggcataactacgaggctgaactcagaactactctccagaggcaggtcgagccaaccgttacaataagtccaagccgaacagaggcattgaaccatcataatctgctggtctgctccgtgacagacttttatcctgcacagataaaagtgcagtggtttagaaatgatcaagaggaaaccgccggagtggtcagtactagcctgatcagaaatggcgactggactttccaaatcctggtgatgctggaaatcactccccagagaggcgatatctatacgtgtcaggtggagcacccgagcctgcagagtcctattacagtggagtggagagcgcagagcgagtcagcccaatctaaaatgttggggggtgtgggaggattcgttctgggacttattttcctggggctaggacttatcatccggcacaggggccagaaagggcctcgcggtccccctccggcaggcaatatatctgccatgattcagtctggggaaagagcacaagcctag

SEQ ID NO: 345339 - DNA, 828 bp, Artificial Sequence
  derived and/or modified sequence
atggccttacagattcctggaggtttctgggctgcggcagtaactgtcatgttggtaatgctgtctacccccgttgcagaggcccgtgactttcccaaggactttttagtgcaattcaagggcatgtgctactttactaatgggacggagcgcgtccgcggagtcgcaagatacatctataatagggaagagtacgggcgatttgattcagacgtcggtgaattccaggctgttacagagctaggacgatccatcgaggactggaacaactacaaagatttcctcgaacaggaacgggctgccgtggataaggtatgtcggcacaattatgaagctgagctgcgtactaccctgcagagacaagtggagcctactgtcaccatcagtccgagtaggaccgaggcgctcaaccaccataatcttctggtgtgcagcgtgaccgacttctacccagctcagattaaagtacaatggttcaggaacgaccaggaggaaaccgctggcgttgtctcgacttccttgatcaggaacggcgactggacgttccagatcctcgtcatgctcgagatcaccccccagcgaggcgacatttatacttgccaggtggaacatcccagcttacagagcccgatcactgtagagtggcgggctcagagcgagtcagcacaatcaaaaatgctgggtggggtcgggggtttcgttctgggcctcatatttctgggtctcgggctgatcatccgtcaccgaggacagaagggacccagggggccaccgccagctggaaatatttccgctatgatacagtcaggcgaaagggcacaggcctag

SEQ ID NO: 345340 - DNA, 828 bp, Artificial Sequence
  derived and/or modified sequence
atggctctgcagatcccaggagggttttgggccgctgctgttaccgtgatgttagtgatgttgtccactcccgtcgcagaagctcgcgacttcccaaaagatttccttgtccagtttaaaggcatgtgttattttacgaacggaacggaacgcgtgagaggcgtcgctagatacatctataatcgcgaagaatacggtagattcgactcggacgtgggagaattccaagcagtcactgagctcggcaggagtatagaggactggaataattataaggacttcctcgagcaggagagggcagcggtggacaaggtgtgccggcataattacgaggcggaactgcggacaactcttcaaagacaggtcgagcccacggttaccatctctccatcacggactgaggctcttaaccaccacaatctgctcgtctgctccgtcactgatttttatcccgcacagatcaaggtgcagtggttccgcaatgaccaggaggagacggccggagtggtcagcacttccctcatcagaaacggcgactggaccttccagattctcgtcatgcttgagataacaccgcagcggggagacatttacacctgtcaggtagaacacccaagcctgcaaagccccatcactgttgaatggagggcacagagtgaaagtgcccagtctaaaatgctgggaggcgtcgggggattcgtgctgggccttattttcctgggcttaggtttgatcattaggcaccgtgggcaaaaaggtcccaggggacctccgccagccggaaatatctccgctatgatccaatcaggtgagcgagcccaggcatag

SEQ ID NO: 345341 - DNA, 828 bp, Artificial Sequence
  derived and/or modified sequence
atggctctgcagattcccggagggttttgggcagctgcagtgacagtcatgctggtgatgctctccactccagtggctgaggcacgggatttccctaaggacttccttgtgcaattcaaaggcatgtgttacttcacaaacggtacggaacgcgttaggggcgtcgccagatatatctacaaccgggaggagtacggacgatttgattccgatgtaggcgagtttcaggcggttacagagctgggcaggtctattgaagactggaataattacaaggatttcctcgaacaggaacgggcagcagtcgataaagtatgcaggcacaactacgaagccgagctgaggaccacactgcagagacaggtggaaccaacggtgaccatttctcccagtcgcaccgaggctttgaaccatcacaacctgctagtgtgctccgtgaccgatttttaccccgctcagatcaaggtgcagtggttcaggaatgaccaggaagaaacagctggcgtggtatccacttccctcatcaggaacggcgactggacgttccagatactggtgatgttagagattacacctcagcggggtgacatatatacatgtcaggtggagcacccctctttgcagtcccctataactgtcgagtggagagcccagtctgagtcggctcaatctaaaatgctcggaggtgtcggcggattcgtcctcgggcttatcttcttggggctgggcctcatcattcgacaccggggacagaagggccctagaggccctccaccagccggaaacatctccgcgatgattcagagtggggaaagggcacaagcctag

SEQ ID NO: 345342 - protein, 295 aa, Artificial Sequence
  derived and/or modified sequence
MAVMAPRTLLLLLLGALALTQTWAGSHSMRYFFTSVSRPGRGEPRFIAVGYVDDTQFVRFDSDAASQRMEPRAPWIEQEGPEYWDQETRNVKAHSQTDRRYLENGKETLQRTDAPKTHMTHHAVSDHEATLRCWALSFYPAEITLTWQRDGEDQTQDTELVETRPAGDGTFQKWASVVVPSGQEQRYTCHVQHEGLPKPLTLRWEPSSQPTIPIVGIIAGLVLFGAMFAGAVVAAVRWRRKSSGGEGMKGGSEISCLTEGSKTQVEVCPASLLGSTIHNYGPTQPGPCVPALTLL

SEQ ID NO: 345343 - protein, 295 aa, Artificial Sequence
  derived and/or modified sequence
MAVMAPRTLVLLLSGALALTQTWAGSHSMRYFYTSVSRPGRGEPRFIAVGYVDDTQFVRFDSDAASQRMEPRAPWIEQEGPEYWDRNTRNVKAHSQTDRAYLENGKETLQRTDAPKTHMTHHAVSDHEATLRCWALSFYPAEITLTWQRDGEDQTQDTELVETRPAGDGTFQKWASVVVPSGQEQRYTCHVQHEGLPKPLTLRWEPSSQPTIPIVGIIAGLVLFGAVIAGAVVAAVMWRRKSSGGEGMKGGSEISCLTEGSKTQVEVCPASLLGSTIHNYEPTQPGPCVPALTLL

SEQ ID NO: 345344 - protein, 246 aa, Artificial Sequence
  derived and/or modified sequence
MVVMAPRTLFLLLSGALTLTETWAGSHSMRYFSAAVSRPGRGEPRFIAMGYVDDTQFVRFDSDSACPRMEPRAPWVEQEGPEYWEEETRNTKAHAQTDRMNLQTLRGYYNQSEANPPKTHVTHHPVFDYEATLRCWALGFYPAEIILTWQRDGEDQTQDVELVETRPAGDGTFQKWAAVVVPSGEEQRYTCHVQHEGLPEPLMLRWKQSSLPTIPIMGIVAGLVVLAAVVTGAAVAAVLWRKKSSD

SEQ ID NO: 345345 - DNA, 1902 bp, Artificial Sequence
  derived and/or modified sequence
agattctccccagacgccgaggatggccgtcatggcgccccgaaccctcctcctgctactcttgggggccctggccctgacccagacctgggcgggctcccactccatgaggtatttcaccacatccgtgtcccggcccggccgcggggagccccgcttcatcgccgtgggctacgtggacgacacgcagttcgtgcggtttgacagcgacgccgcgagccagaggatggagccgcgggcaccgtggatagagcaggaggggccggagtattgggacctgcagacacggaatgtgaaggcccagtcacagactgaccgagcatacctggagaacgggaaggagacgctgcagcgcacggacgcccccaagacgcatatgactcaccacgctgtctctgaccatgaggccaccctgaggtgctgggccctgagcttctaccctgcggagatcacactgacctggcagcgggatggggaggaccagacccaggacacggagcttgtggagaccaggcctgcaggggatggaaccttccagaagtgggcgtctgtggtggtgccttctggacaggagcagagatacacctgccatgtgcagcatgagggtctgcccaagcccctcaccctgagatgggagccgtcttcccagcccaccatccccatcgtgggcatcattgctggcctagttctctttggagctgtgttcgctggagctgtggtcgctgctgtgaggtggaggaggaagagctcaggtggggaagggatgaagggtgggtctgagatttcttgtctcactgagggttccaagacccaggtagaagtgtgccctgcctcgttactgggaagcaccatccacaattatgggcctacccagcctgggccctgtgtgccagcacttactcttttgtaaagcacctgttaaaatgaaggacagatttatcaccttgattacggcggtgatgggacctgatcccagcagtcacaagtcacaggggaaggtccctgaggaccttcaggagggcggttggtccaggacccacacctgctttcttcatgtttcctgatcccgccctgggtctgcagtcacacatttctggaaacttctctgaggtccaagacttggaggttcctctaggaccttaaggccctggctcctttctggtatctcacaggacattttcttcccacagatagaaaaggagggagctactctcaggctgcaagtaagtatgaaggaggctgatgcctgaggtccttgggatattgtgtttgggagcccgtgggggagctcacccaccccacaattcctcctctagccacatcttctgtgggatctgaccaggttctgtttttgtcctaccccaggcagtgacagtgcccagggctctgatatgtctctcacagcttgtaaaggtgagagcctggagggcctgatgtgtgttgggtgttgggcggaacagtggacgcagctgtgctatggggtttctttgcattggatgtattgagcatgcgatgggctgtttaaagtgtgactcctcactgtgacagatacgaatttgttcatgaatatttttttctatagtgtgagacagctgccttgtgtgggactgagaggcaagatttgttcctgcccttccctttgtgacttgaagaaccctgactttgtttctgcaaaggcacctgcatgtgtctgtgttcttgtaggcataatgtgaggaggtggggagaccaccccacccccatgtccaccatgaccctcttcccacgctgacctgtgctccctccccaatcatctttcctgttccagagaggtggggctgaggtgtctccatctctgcctcaacttcatggtgcactgagctgtaacttcttccttccctattaaaattagaacctgagtat

SEQ ID NO: 345346 - DNA, 1902 bp, Artificial Sequence
  derived and/or modified sequence
agattctccccagacgccgaggatggccgtcatggcgccccgaaccctcctcctgctactcttgggggccctggccctgacccagacctgggcgggctcccactccatgaggtatttcttcacatccgtgtcccggcccggccgcggggagccccgcttcatcgccgtgggctacgtggacgacacgcagttcgtgcggtttgacagcgacgccgcgagccagaggatggagccgcgggcgccgtggatagagcaggaggggccggagtattgggaccaggagacacggaatgtgaaggcccactcacagactgaccgaagatacctggagaacgggaaggagacgctgcagcgcacggacgcccccaagacgcatatgactcaccacgctgtctctgaccatgaggccaccctgaggtgctgggccctgagcttctaccctgcggagatcacactgacctggcagcgggatggggaggaccagacccaggacacggagcttgtggagaccaggcctgcaggggatggaaccttccagaagtgggcgtctgtggtggtgccttctggacaggagcagagatacacctgccatgtgcagcatgagggtctgcccaagcccctcaccctgagatgggagccgtcttcccagcccaccatccccatcgtgggcatcattgctggcctagttctctttggagctatgttcgctggagctgtggtcgctgctgtgaggtggaggaggaagagctcaggtggggaagggatgaagggtgggtctgagatttcttgtctcactgagggttccaagacccaggtagaagtgtgccctgcctcgttactgggaagcaccatccacaattatgggcctacccagcctgggccctgtgtgccagcacttactcttttgtaaagcacctgttaaaatgaaggacagatttatcaccttgattacggcggtgatgggacctgatcccagcagtcacaagtcacaggggaaggtccctgaggaccttcaggagggcggttggtccaggacccacacctgctttcttcatgtttcctgatcccgccctgggtctgcagtcacacatttctggaaacttctctgaggtccaagacttggaggttcctctaggaccttaaggccctggctcctttctggtatctcacaggacattttcttcccacagatagaaaaggagggagctactctcaggctgcaagtaagtatgaaggaggctgatgcctgaggtccttgggatattgtgtttgggagcccgtgggggagctcacccaccccacaattcctcctctagccacatcttctgtgggatctgaccaggttctgtttttgtcctaccccaggcagtgacagtgcccagggctctgatatgtctctcacagcttgtaaaggtgagagcctggagggcctgatgtgtgttgggtgttgggcggaacagtggacgcagctgtgctatggggtttctttgcattggatgtattgagcatgcgatgggctgtttaaagtgtgactcctcactgtgacagatacgaatttgttcatgaatatttttttctatagtgtgagacagctgccttgtgtgggactgagaggcaagatttgttcctgcccttccctttgtgacttgaagaaccctgactttgtttctgcaaaggcacctgcatgtgtctgtgttcttgtaggcataatgtgaggaggtggggagaccaccccacccccatgtccaccatgaccctcttcccacgctgacctgtgctccctccccaatcatctttcctgttccagagaggtggggctgaggtgtctccatctctgcctcaacttcatggtgcactgagctgtaacttcttccttccctattaaaattagaacctgagtat

SEQ ID NO: 345347 - DNA, 1902 bp, Artificial Sequence
  derived and/or modified sequence
agattctccccagacgccgaggatggccgtcatggcgccccgaaccctcgtcctgctactctcgggggccctggccctgacccagacctgggcgggctcccactccatgaggtatttctacacctccgtgtcccggcccggccgcggggagccccgcttcatcgccgtgggctacgtggacgacacgcagttcgtgcggttcgacagcgacgccgcgagccagaggatggagccgcgggcgccgtggatagagcaggaggggccggagtattgggaccggaacacacggaatgtgaaggcccactcacagactgaccgagcatacctggagaacgggaaggagacgctgcagcgcacggacgcccccaagacgcatatgactcaccacgctgtctctgaccatgaggccaccctgaggtgctgggccctgagcttctaccctgcggagatcacactgacctggcagcgggatggggaggaccagacccaggacacggagctcgtggagaccaggcctgcaggggatgggaccttccagaagtgggcgtctgtggtggtgccttctggacaggagcagagatacacctgccatgtgcagcatgagggtctgcccaagcccctcaccctgagatgggagccgtcttcccagcccaccatccccatcgtgggcatcattgctggcctggttctctttggagctgtgatcgctggagctgtggtcgctgctgtgatgtggaggaggaagagctcaggtggggaagggatgaagggtgggtctgagatttcttgtctcactgagggttccaagacccaggtagaagtgtgccctgcctcgttactgggaagcaccatccacaattatgagcctacccagcctgggccctgtgtgccagcacttactcttttgtaaagcacctgttaaaatgaaggacagatttatcaccttgattacggcggtgatgggacctgatcccagcagtcacaagtcacaggggaaggtccctgaggaccttcaggagggcggttggtccaggacccacacctgctttcttcatgtttcctgatcccgccctgggtctgcagtcacacatttctggaaacttctctgaggtccaagacttggaggttcctctaggaccttaaggccctggctcctttctggtatctcacaggacattttcttcccacagatagaaaaggagggagctactctcaggctgcaagtaagtatgaaggaggctgatgcctgaggtccttgggatattgtgtttgggagcccgtgggggagctcacccaccccacaattcctcctctagccacatgttctgtgggatctgaccaggttctgtttttgtcctaccccaggcagtgacagtgcccagggctctgatatgtctctcacagcttgtaaaggtgagagcctggagggcctgatgtgtgttgggtgttgggcggaacagtggacgcagctgtgctatggggtttctttgcattggatgtattgagcatgcgatgggctgtttaaagtgtgactcctcactgtgacagatacgaatttgttcatgaatatttttttctatagtgtgagacagctgccttgtgtgggactgagaggcaagatttgttcctgcccttccctttgtgacttgaagaaccctgactttgtttctgcaaaggcacctgcatgtgtctgtgttcttgtaggcataatgtgaggaggtggggagaccaccccacccccatgtccaccatgaccctcttcccacgctgacctgtgctccctccccaatcatctttcctgttccagagaggtggggctgaggtgtctccatctctgcctcaacttcatggtgcactgagctgtaactttttccttccctattaaaattagaacctgagtat

SEQ ID NO: 345348 - protein, 205 aa, Artificial Sequence
  derived and/or modified sequence
MTPPERLFLPRVRGTTLHLLLLGLLLVLLPGAQGLPGVGLTPSAAQTARQHPKMHLAHSTLKPAAHLIGDPSKQNSLLWRANTDRAFLQDGFSLSNNSLLVPTSGIYFVYSQVVFSGKAYSPKATSSPLYLAHEVQLFSSQYPFHVPLLSSQKMVYPGLQEPWLHSMYHGAAFQLTQGDQLSTHTDGIPHLVLSPSTVFFGAFAL

SEQ ID NO: 345349 - protein, 138 aa, Artificial Sequence
  derived and/or modified sequence
MTPPERLFLPRVRGTTLHLLLLGLLLVLLPGAQGLPGVGLTPSAAQTARQHPKMHLAHSTLKPAAHLIGDPSKQNSLLWRANTDRAFLQDGFSLSNNSLLVPTSGIYFVYSQGSSPPLLWPFQQLKSSLIKSPELSKK

SEQ ID NO: 345350 - DNA, 618 bp, Artificial Sequence
  derived and/or modified sequence
atgaccccccccgagagactgttcctgcccagagtgagaggcaccaccctgcacctgctgctgctgggcctgctgctggtgctgctgcccggcgcccagggcctgcccggcgtgggcctgacccccagcgccgcccagaccgccagacagcaccccaagatgcacctggcccacagcaccctgaagcccgccgcccacctgatcggcgaccccagcaagcagaacagcctgctgtggagagccaacaccgacagagccttcctgcaggacggcttcagcctgagcaacaacagcctgctggtgcccaccagcggcatctacttcgtgtacagccaggtggtgttcagcggcaaggcctacagccccaaggccaccagcagccccctgtacctggcccacgaggtgcagctgttcagcagccagtaccccttccacgtgcccctgctgagcagccagaagatggtgtaccccggcctgcaggagccctggctgcacagcatgtaccacggcgccgccttccagctgacccagggcgaccagctgagcacccacaccgacggcatcccccacctggtgctgagccccagcaccgtgttcttcggcgccttcgccctgtag

SEQ ID NO: 345351 - DNA, 417 bp, Artificial Sequence
  derived and/or modified sequence
atgaccccccccgagagactgttcctgcccagagtgagaggcaccaccctgcacctgctgctgctgggcctgctgctggtgctgctgcccggcgcccagggcctgcccggcgtgggcctgacccccagcgccgcccagaccgccagacagcaccccaagatgcacctggcccacagcaccctgaagcccgccgcccacctgatcggcgaccccagcaagcagaacagcctgctgtggagagccaacaccgacagagccttcctgcaggacggcttcagcctgagcaacaacagcctgctggtgcccaccagcggcatctacttcgtgtacagccagggcagcagcccccccctgctgtggcccttccagcagctgaagagcagcctgatcaagagccccgagctgagcaagaagtag

SEQ ID NO: 345352 - DNA, 618 bp, Artificial Sequence
  derived and/or modified sequence
atgacccccccagaacgcctgttcctgccaagggttcggggaactaccttgcacttgctgctgttgggcctgcttctagtactgctgcccggagcccagggtctgccaggggtgggtctaaccccctcggcagcacagactgcaagacaacatccaaagatgcaccttgcacacagcaccctgaaacctgctgcacacctcataggagacccctctaagcagaactccctgctatggagggcaaacacagatcgcgcctttcttcaggacggattttcactgtcaaataattctcttctggtgccaaccagcggcatatacttcgtgtacagccaggtggtgtttagcggcaaggcatacagtcctaaagctactagttctcctttatatctcgcccatgaggtccagctgttttccagccagtatccttttcacgttccattgctgagcagtcagaagatggtgtaccccggactccaggagccttggctccactcgatgtatcacggggctgcattccagttgactcagggcgatcagctgtctacacatacagacggaattccacacttagttctgagtccatcgacagtattttttggggcttttgcgctctag

SEQ ID NO: 345353 - DNA, 618 bp, Artificial Sequence
  derived and/or modified sequence
atgaccccacccgagcggctattcctgcccagagtgcgcgggaccacattgcacctcctgctgctgggcttactgctcgttcttctgcccggcgcccaggggctgcccggagtgggcctgaccccctctgccgcacagaccgcacggcagcaccccaagatgcacctggctcatagtacgcttaaacctgcggcacatctcattggcgatcctagtaagcagaattccttgctttggagagccaatacagaccgagccttcctgcaggatggcttttcattgtcaaataattccctcctggtgcctacctccggcatttatttcgtgtatagccaggttgtgttttccggaaaagcctattctcccaaagccacgtctagcccgctctatttagcccatgaggtgcaattgttctcctctcaatatccctttcatgtgcctcttctgtcatctcagaagatggtctacccaggtttgcaggagccatggctgcattcaatgtatcacggcgccgctttccagttaactcaaggagaccagctgagtacacatactgatggcataccccatctggttctgtcaccatccacagtgttctttggcgctttcgcgctatag

SEQ ID NO: 345354 - DNA, 417 bp, Artificial Sequence
  derived and/or modified sequence
atgactcctccagaaaggctgtttctccccagagtgcgaggcactacactgcacctgttactcctcggcctgctactggtcctactgccaggtgcccagggattgccaggagttggacttactccctctgccgctcagaccgctcgccaacatcccaagatgcacctggcccattccaccctgaaacctgctgctcatctgattggggatccctctaagcagaactcgctgctatggcgggcgaacactgatcgcgcctttctgcaggacggcttctctctttccaacaattccctgcttgtacctacctctgggatctattttgtgtattcgcaagggtccagtccacctctattgtggccttttcagcagctgaaatctagtttgattaagtccccagaactgagcaagaagtag

SEQ ID NO: 345355 - DNA, 618 bp, Artificial Sequence
  derived and/or modified sequence
atgaccccacctgagcggctcttcctgccccgggtgcggggcaccaccctgcacctgctgctgctgggcctgctgctggtgctgctgcccggggcccagggcctgcccggggtgggcctgaccccatctgctgcccagacagcccggcagcaccccaagatgcacctggcccacagcaccctgaagccagctgcccacctgattggagaccccagcaagcagaacagcctgctgtggagggccaacacagaccgggccttcctgcaggacggcttcagcctgagcaacaacagcctgctggtgcccaccagcggcatctactttgtgtacagccaggtggtgttcagcggcaaggcctacagccccaaggccaccagcagccccctgtacctggcccacgaggtgcagctgttcagcagccagtaccccttccacgtgcccctgctgagcagccagaagatggtgtacccaggcctgcaggagccctggctgcacagcatgtaccatggagctgccttccagctgacccagggcgaccagctgagcacccacacagatggcatcccccacctggtgctgagccccagcacagtgttcttcggggcctttgccctgtag

SEQ ID NO: 345356 - DNA, 417 bp, Artificial Sequence
  derived and/or modified sequence
atgaccccacctgagcggctcttcctgccccgggtgcggggcaccaccctgcacctgctgctgctgggcctgctgctggtgctgctgcccggggcccagggcctgcccggggtgggcctgaccccatctgctgcccagacagcccggcagcaccccaagatgcacctggcccacagcaccctgaagccagctgcccacctgattggagaccccagcaagcagaacagcctgctgtggagggccaacacagaccgggccttcctgcaggacggcttcagcctgagcaacaacagcctgctggtgcccaccagcggcatctactttgtgtacagccagggcagcagcccccccctgctgtggcccttccagcagctgaagagcagcctcatcaagagccctgagctgagcaagaagtag

SEQ ID NO: 345357 - DNA, 1422 bp, Artificial Sequence
  derived and/or modified sequence
ccaggggctccgcacagcaggtgaggctctcctgccccatctccttgggctgcccgtgcttcgtgctttggactaccgccccgcagtgtcctgccctctgcctgggcctcggtccctcctgcacctgctgcctggatccccggcctgcctgggcctgggccttggttctccccatgacaccacctgaacgtctcttcctcccaagggtgcgtggcaccaccctacacctcctccttctggggctgctgctggttctgctgcctggggcccaggggctccctggtgttggcctcacaccttcagctgcccagactgcccgtcagcaccccaagatgcatcttgcccacagcaccctcaaacctgctgctcacctcattggagaccccagcaagcagaactcactgctctggagagcaaacacggaccgtgccttcctccaggatggtttctccttgagcaacaattctctcctggtccccaccagtggcatctacttcgtctactcccaggtggtcttctctgggaaagcctactctcccaaggccacctcctccccactctacctggcccatgaggtccagctcttctcctcccagtaccccttccatgtgcctctcctcagctcccagaagatggtgtatccagggctgcaggaaccctggctgcactcgatgtaccacggggctgcgttccagctcacccagggagaccagctatccacccacacagatggcatcccccacctagtcctcagccctagtactgtcttctttggagccttcgctctgtagaacttggaaaaatccagaaagaaaaaataattgatttcaagaccttctccccattctgcctccattctgaccatttcaggggtcgtcaccacctctcctttggccattccaacagctcaagtcttccctgatcaagtcaccggagctttcaaagaaggaattctaggcatcccaggggaccacacctccctgaaccatccctgatgtctgtctggctgaggatttcaagcctgcctaggaattcccagcccaaagctgttggtctgtcccaccagctaggtggggcctagatccacacacagaggaagagcaggcacatggaggagcttgggggatgactagaggcagggaggggactatttatgaaggcaaaaaaattaaattatttatttatggaggatggagagaggggaataatagaagaacatccaaggagaaacagagacaggcccaagagatgaagagtgagagggcatgcgcacaaggctgaccaagagagaaagaagtaggcatgagggatcacagggccccagaaggcagggaaaggctctgaaagccagctgccgaccagagccccacacggaggcatctgcaccctcgatgaagcccaataaacctcttttctctgaaa

SEQ ID NO: 345358 - DNA, 1507 bp, Artificial Sequence
  derived and/or modified sequence
tcccagcccacgattcccctgacccgactccctttcccagaactcagtcgcctgaacccccagcctgtggttctctcctaggcctcagcctttcctgcctttgactgaaacagcagtatcttctaagccctgggggcttccccgggccccagccccgacctagaacccgcccgctgcctgccacgctgccactgccgcttcctctataaagggacctgagcgtccgggcccaggggctccgcacagcaggttctccccatgacaccacctgaacgtctcttcctcccaagggtgcgtggcaccaccctacacctcctccttctggggctgctgctggttctgctgcctggggcccaggggctccctggtgttggcctcacaccttcagctgcccagactgcccgtcagcaccccaagatgcatcttgcccacagcaccctcaaacctgctgctcacctcattggagaccccagcaagcagaactcactgctctggagagcaaacacggaccgtgccttcctccaggatggtttctccttgagcaacaattctctcctggtccccaccagtggcatctacttcgtctactcccaggtggtcttctctgggaaagcctactctcccaaggccacctcctccccactctacctggcccatgaggtccagctcttctcctcccagtaccccttccatgtgcctctcctcagctcccagaagatggtgtatccagggctgcaggaaccctggctgcactcgatgtaccacggggctgcgttccagctcacccagggagaccagctatccacccacacagatggcatcccccacctagtcctcagccctagtactgtcttctttggagccttcgctctgtagaacttggaaaaatccagaaagaaaaaataattgatttcaagaccttctccccattctgcctccattctgaccatttcaggggtcgtcaccacctctcctttggccattccaacagctcaagtcttccctgatcaagtcaccggagctttcaaagaaggaattctaggcatcccaggggaccacacctccctgaaccatccctgatgtctgtctggctgaggatttcaagcctgcctaggaattcccagcccaaagctgttggtctgtcccaccagctaggtggggcctagatccacacacagaggaagagcaggcacatggaggagcttgggggatgactagaggcagggaggggactatttatgaaggcaaaaaaattaaattatttatttatggaggatggagagaggggaataatagaagaacatccaaggagaaacagagacaggcccaagagatgaagagtgagagggcatgcgcacaaggctgaccaagagagaaagaagtaggcatgagggatcacagggccccagaaggcagggaaaggctctgaaagccagctgccgaccagagccccacacggaggcatctgcaccctcgatgaagcccaataaacctcttttctctgaaa

SEQ ID NO: 345359 - DNA, 554 bp, Artificial Sequence
  derived and/or modified sequence
gccccatctccttgggctgcccgtgcttcgtgctttggactaccgccccgcagtgtcctgccctctgcctgggcctcggtccctcctgcacctgctgcctggatccccggcctgcctgggcctgggccttggttctccccatgacaccacctgaacgtctcttcctcccaagggtgcgtggcaccaccctacacctcctccttctggggctgctgctggttctgctgcctggggcccaggggctccctggtgttggcctcacaccttcagctgcccagactgcccgtcagcaccccaagatgcatcttgcccacagcaccctcaaacctgctgctcacctcattggagaccccagcaagcagaactcactgctctggagagcaaacacggaccgtgccttcctccaggatggtttctccttgagcaacaattctctcctggtccccaccagtggcatctacttcgtctactcccaggggtcgtcaccacctctcctttggccattccaacagctcaagtcttccctgatcaagtcaccggagctttcaaagaag

SEQ ID NO: 345360 - DNA, 618 bp, Artificial Sequence
  derived and/or modified sequence
atgaccccccccgagcggctgttcctgccccgggtgcggggcaccacccttcatctgttgctgctgggactgctgctggtcctgctaccaggcgcgcagggcctccctggcgtcgggctgactccttccgcagcccagaccgctcgtcagcatcccaagatgcacctcgctcactcaaccctgaagcctgccgcgcacctcatcggtgacccgtcgaagcagaactctctgctgtggagggcaaacacggatagagccttcctgcaggacggtttctctctctccaataactccttgctggtacccacaagcggcatctactttgtgtatagtcaggtggtctttagcggaaaggcatactcaccgaaagccactagtagtcccctgtacctggcccacgaggtgcagctctttagtagtcagtatcctttccatgttcctttgctgtcttctcagaagatggtctatcctgggctccaggagccttggctccatagcatgtatcatggcgctgcattccagctgacgcagggcgaccagctctccacacacactgacggcatcccgcaccttgttctttcgcccagcaccgtgtttttcggggcctttgccctatag

SEQ ID NO: 345361 - DNA, 618 bp, Artificial Sequence
  derived and/or modified sequence
atgaccccccccgagcggctgttcctgccccgggtgcggggcaccacactccatctgcttctgctgggattgctcctagtactgctgcctggagcccagggcctgccgggagtgggcctgacacctagtgccgcacagacagcgagacagcatcccaagatgcacctggctcattcaactttgaagcccgcggcccacctgatcggcgaccccagtaaacagaatagcttactgtggagagcaaacactgacagagccttcctccaggacgggttttccctctcaaacaacagcctcttagttcccactagtggaatctatttcgtgtattcacaagtagtgtttagcgggaaggcctactctccaaaagctactagctcacccctgtacctcgcccacgaggtacagctgttttcttcccaataccctttccacgtgccccttctatcatctcagaaaatggtttaccccggtttacaggagccctggctccattctatgtatcatggggccgccttccaactgacccagggcgaccagctctctacacacacagatggtattccacatttggttcttagtcccagtactgtattctttggagccttcgccttatag

SEQ ID NO: 345362 - DNA, 417 bp, Artificial Sequence
  derived and/or modified sequence
atgaccccccccgagcggctgttcctgccccgggtgcggggcaccaccctacacctcttactgttgggactgcttctcgtgctcctgcccggagcccagggtttacctggggtcggcctcactcccagtgctgcccagacagcacgccaacaccccaagatgcatcttgcacactcaaccctcaaacctgccgcccatctgattggcgacccgtccaagcagaacagcctgttatggcgtgccaacaccgatagagccttcttgcaggatggattctctttatccaacaactcattgcttgtgccgacaagtggcatctacttcgtctatagtcagggatcttcaccacccctgctgtggccctttcagcagttgaagtccagcctgataaaatcacctgaactgagcaaaaaatag

SEQ ID NO: 345363 - DNA, 618 bp, Artificial Sequence
  derived and/or modified sequence
atgacacctcccgagcgcctgttcttgccacgggtacgtggtacaaccttgcacctattgttgctggggctgctgttggttctcttgccaggtgctcagggtctacccggagtagggctaaccccttccgctgcgcaaactgccaggcagcatccaaagatgcacctcgctcatagtaccctcaaacccgcagcccacttaatcggtgacccttccaaacagaactccctgctgtggcgggcaaacactgatcgagcttttcttcaagatgggttcagcctgtcaaataatagtctgctggtgcccacatctggcatctatttcgtctatagtcaggtggtgtttagtgggaaagcgtacagtcctaaagctacatcaagtccactgtacctagcccacgaggtacagctgttctcgagccagtacccatttcacgtacctctgttgtcctcacaaaagatggtgtaccccggtttacaggaaccctggctgcacagtatgtatcacggcgcagccttccagctgacacagggcgatcagctttcaacccacaccgacggaatcccccatctcgtcctgagccctagcacggtgtttttcggcgctttcgcactttag

SEQ ID NO: 345364 - DNA, 618 bp, Artificial Sequence
  derived and/or modified sequence
atgacgcctccggagcgattgtttcttcctcgggtgcggggaaccacacttcatctgctgctgttaggcctcctactagttctcctaccaggagcccaggggctaccaggggtcggtttaacaccctctgctgctcagactgcacggcagcatccgaaaatgcatctggcccattctacattgaaaccagccgcacaccttattggcgatccttccaaacaaaactccctgctgtggagggccaatacggatcgggcttttctccaagacggcttttccctgagcaacaacagcttactcgttccaactagtggaatctactttgtctacagccaggtggttttctcaggcaaagcttattcccccaaagcaacctcctctcctttatacctggcccacgaggtacaactgttctccagccaatatcctttccacgtcccactcctgtctagccagaagatggtgtatcctggtctccaggagccatggttacactcaatgtaccatggagccgcattccagctgacccagggcgatcagctgagcacccacacagatgggataccccacttggtcttgtcaccgtcaactgtctttttcggcgcattcgcactttag

SEQ ID NO: 345365 - DNA, 417 bp, Artificial Sequence
  derived and/or modified sequence
atgactccaccggaaagattatttttgcccagggtgcgtggcacaactctgcacctactcttgctgggccttctgcttgtgctgctccccggagcccagggcctgcccggtgtgggactgacacctagcgccgcacaaacagctcgacagcacccaaagatgcacctcgctcactcaactttgaagcccgcagcccatctcattggtgatccttccaagcaaaactcccttctctggcgcgctaataccgaccgagccttcctgcaggacgggttttctttgtcaaacaatagtctcctggtgcctacctcagggatttatttcgtgtacagtcaggggtccagcccacccctcctctggccatttcagcagctgaagtccagtttgataaagagccctgaactatcgaaaaagtag

SEQ ID NO: 345366 - DNA, 618 bp, Artificial Sequence
  derived and/or modified sequence
atgacaccacctgagcgtctttttctccctagagtccgagggaccactcttcatttactgctgctgggtctgctcctggtgttgctgccaggagcacaggggctgcccggcgtaggcctgactccatcagccgcacagaccgcacggcagcaccctaaaatgcacttagcacacagcaccctgaagccagcggcccacttgattggagatccatctaagcagaatagccttctttggagagctaatactgacagagcatttctgcaggacggatttagtctttccaacaactccctgctagtgcctacttctgggatttatttcgtctacagccaggtcgtgttctctgggaaggcgtatagccccaaggccacctcatccccactctatttggcccatgaagtacagctgttcagtagccagtatcccttccatgtccccctgctgagcagccagaagatggtgtaccccggcctccaggaaccgtggttacattccatgtatcacggtgctgcctttcaactcacacagggcgatcagttgagtacccacacagacggaattccacatctggtgctctcaccatccacagtgttcttcggggcgttcgccctgtag

SEQ ID NO: 345367 - DNA, 618 bp, Artificial Sequence
  derived and/or modified sequence
atgactccaccggaacgtctgttcttacctcgggtgaggggaacaacccttcacctattattgttggggctgttattagtgttactgccaggagctcaggggctgccaggggtggggctcaccccgtctgccgctcagactgcacgccagcatccgaaaatgcatcttgcgcattccactctgaagcccgcagcccacctgatcggagaccctagcaagcaaaattctctgctgtggcgagccaataccgaccgagccttcctgcaagacggcttctctctgtctaataactctctcctggtgccgacctccggcatctactttgtgtactcgcaggttgtcttcagcgggaaagcttacagccccaaagccaccagcagccccctttacctggcgcacgaggtgcagctgtttagcagccagtacccattccatgttcctctgctgtctagtcagaagatggtctaccccgggttacaagagccttggttgcactctatgtaccacggcgcagcattccaactaacacaaggggatcagttgtcaacccatacagacggaattccacatctggttttgagcccatctactgtctttttcggggcgttcgccctctag

SEQ ID NO: 345368 - DNA, 618 bp, Artificial Sequence
  derived and/or modified sequence
atgacacctccagaacgtctctttttacccagggtacgggggacaaccttacacctgctcctcctagggctgttgctcgttctcctgcctggtgcccagggactcccaggtgtgggattgactccatctgctgcccagacggcacggcagcaccccaagatgcatctcgctcattctaccctgaagccagctgcccatctgatcggtgacccatctaaacagaacagcctcctctggcgtgccaacacagaccgggcttttctacaggatgggtttagcctctccaataatagcctgctcgtgccaactagcggaatctatttcgtgtactcacaggtagtgttcagcggcaaggcgtattctccaaaagcaacttcatcccccctgtatttagcacacgaagtgcaactgttttcatcccagtacccatttcatgtgcctcttctttcatcccaaaagatggtttatcctggtctacaggagccctggctccattctatgtaccacggcgctgcttttcagttaacccaaggagaccagcttagcacgcacaccgatggcattccccacctcgtgctctccccttctacagtttttttcggcgccttcgcactgtag

SEQ ID NO: 345369 - DNA, 618 bp, Artificial Sequence
  derived and/or modified sequence
atgacaccacccgaacgcctctttctgcccagagtgcgtgggaccaccctgcatttgctgctactgggcctactgctcgtactcttgcctggcgcccagggcctccctggtgtaggtcttactccatctgcggcccagactgctcggcagcaccccaagatgcacttggcccattctaccctgaagccagcagctcacttgatcggagaccccagcaagcagaacagcctgctctggagggctaacactgatcgtgccttccttcaggatggtttcagcctctcgaataacagcctacttgtgcctacatcaggaatatatttcgtttattcacaggtggttttcagcggtaaagcgtactcccccaaggccacctctagtcctctgtatttggctcatgaggtgcagctgttttcgtctcagtaccctttccatgttcctttgttgagttcccagaaaatggtttatcccggtctgcaggagccctggctgcactctatgtatcacggagcggcatttcagcttacccagggagatcaattgtccacacacactgatgggatcccacacctcgtcctatcacccagcacagtttttttcggcgcctttgcactctag

SEQ ID NO: 345370 - DNA, 417 bp, Artificial Sequence
  derived and/or modified sequence
atgacacctcccgagcgcctctttctgccaagagtgagaggcactacgttgcacctgttgttactaggccttctcctggtgttgctgcccggagcacaaggcctacccggcgtagggctgacccccagcgccgctcaaacagcccgtcagcaccccaagatgcacctggctcatagcacactcaaaccggccgcccacctgataggggaccctagcaagcagaactcacttctctggcgtgcaaataccgatcgtgctttcctgcaggacggcttcagcctcagtaataacagcctgctagtacccacctcaggcatttattttgtttattcccagggctcctcaccacctctgctgtggccttttcagcaactgaagtcgagcttaatcaagtcgccggaactaagcaaaaagtag

SEQ ID NO: 345371 - DNA, 417 bp, Artificial Sequence
  derived and/or modified sequence
atgacgccaccggagcgattattcctgccccgggtcagagggaccaccttacatctacttttgctaggcctgctgctggtcctattgcccggagcccaagggttacctggtgtaggacttaccccatcagccgcacaaaccgctcggcaacatcccaagatgcatttagcacactccacgctgaagccagctgcgcacttgattggcgatccctctaagcagaactcactgctgtggcgagcgaacactgatcgtgcctttctgcaggatggcttcagtttgagcaataattccctccttgtccctacctctggcatctatttcgtctattcgcagggatcctctccaccactcctgtggccctttcagcagttgaaaagttccctgataaagagccccgaactgtctaaaaaatag

SEQ ID NO: 345372 - DNA, 618 bp, Artificial Sequence
  derived and/or modified sequence
atgaccccccccgagcggctgttcctgccccgggtgcggggcaccacactgcacctgctcttgctaggtctactcctcgtcttgttgccaggtgcgcagggtttgccaggcgtcgggttgacgccttcagctgctcagactgctagacaacatcccaagatgcatctcgcacactccactcttaaaccggccgctcacctcatcggggatccttccaagcagaacagtctgctctggcgagctaatacagaccgagcttttctgcaggatggtttttctctgtcgaataattcactccttgtgccaacatctgggatttatttcgtctactcccaggtggtattctcagggaaagcttacagcccgaaggcgactagctctcccttgtatttggcccacgaggtgcagcttttttccagtcaatatccattccatgtgccactgctttccagtcagaagatggtttaccctggattgcaagaaccttggctacactcaatgtaccacggggccgcctttcagctcacacagggtgaccagctgtcaacacatactgatggcatcccacatctcgtgctgagtccctccacagtgttctttggagccttcgccttgtag

SEQ ID NO: 345373 - DNA, 618 bp, Artificial Sequence
  derived and/or modified sequence
atgaccccccccgagcggctgttcctgccccgggtgcggggcaccactttgcatttgctcctgctgggactgctgctggtactgctgccaggcgctcagggactgcctggcgtcgggctgacaccgagcgcagcacaaacagcaaggcagcaccctaagatgcacctggctcactctactctgaaacccgctgctcaccttatcggcgatcccagcaaacagaacagcctgttatggcgggctaacacagacagagcattcctgcaggacggattttctctgtcaaacaatagtctgctcgtccctactagcggaatctatttcgtgtatagccaggtcgtgttctcgggtaaggcttactcgcccaaagccacttctagccctctttacctggcccacgaggtgcagcttttctcctcccagtatcccttccacgttccactactctcaagccagaagatggtgtatcctggtctgcaggaaccgtggcttcactcaatgtaccacggagcggcgttccagctcacccagggcgatcagctaagcacacatactgatggcattcctcacttggtgttatcaccctcgactgtctttttcggcgcatttgccttatag

SEQ ID NO: 345374 - DNA, 618 bp, Artificial Sequence
  derived and/or modified sequence
atgaccccccccgagcggctgttcctgccccgggtgcggggcaccacactgcacctgctgcttctggggctactgctggtgctcttgcccggggcgcaagggcttccaggagtggggcttactccttccgccgcccagacagccagacagcatcctaagatgcaccttgcccactcaaccctgaagcccgctgctcatctgatcggagatccctcaaaacagaattcgctgctgtggcgcgcaaacaccgacagggccttcctgcaggatggattctcattaagcaacaacagccttctcgtgcccacgtctggcatctatttcgtttactctcaagtggtctttagcggaaaagcctatagccctaaggcgacatcctcgcccctgtacctagctcatgaagtgcaattattctccagtcaatatcctttccacgttcctctcctttcctctcagaaaatggtttatccagggttacaggagccttggctgcattccatgtatcacggcgctgcctttcagttaacacagggcgatcaattatctacccataccgacgggattccacatctagtccttagccccagtaccgtgttctttggggccttcgcactttag

SEQ ID NO: 345375 - DNA, 618 bp, Artificial Sequence
  derived and/or modified sequence
atgaccccccccgagcggctgttcctgccccgggtgcggggcaccactctccacttgttgcttctaggcctgttactggttctgctgcccggcgcacaaggccttcccggcgttggacttaccccctctgcagcccaaaccgcacggcagcaccctaaaatgcacctagctcatagtaccctgaagcccgccgcacatttgatcggcgacccatccaaacagaattcactgttatggcgagccaacaccgatagagcttttcttcaggatgggttctcactgtccaataattccctgctggtgcctacctcaggaatctactttgtttattcgcaggtcgtgttcagtggaaaggcttatagccctaaggccacatccagtccactgtacttagcacacgaggtgcagctgtttagctcacagtacccatttcatgttcctttactgagctctcagaagatggtttatccaggcctgcaagaaccatggctgcattcgatgtatcatggtgcagcatttcagctgacgcaaggcgatcaactgtccactcatactgatggcattccccatttagttctgtccccctcaactgtctttttcggcgcctttgctctgtag

SEQ ID NO: 345376 - DNA, 417 bp, Artificial Sequence
  derived and/or modified sequence
atgaccccccccgagcggctgttcctgccccgggtgcggggcaccacccttcacctgttgttacttggcctgctgttggtcctcctgccaggcgctcaagggttgcctggtgtcgggctcaccccatccgccgcccaaactgcccgccaacaccccaagatgcacctggcccattccacgctcaaacctgcagctcacttgattggcgatcccagcaaacagaattctctgctttggcgcgcaaacaccgatcgggcctttttacaagatggttttagcctatctaacaatagcctgctggtgccaacgagcggcatctacttcgtatattctcagggatcatctccccccctgttatggcctttccagcagttgaagtcttccttgatcaaaagcccagaactctccaaaaagtag

SEQ ID NO: 345377 - DNA, 417 bp, Artificial Sequence
  derived and/or modified sequence
atgaccccccccgagcggctgttcctgccccgggtgcggggcaccacactgcacctgcttctcctggggctactgctggttttactgccgggggctcagggactccccggggtggggctgacacctagcgcagctcagactgcacgtcaacaccccaaaatgcacctcgcccactccacactgaaacctgccgctcatctcatcggcgacccctctaagcagaactcccttctgtggcgtgccaacaccgatcgcgccttccttcaggacggcttctcactgtccaataacagcctccttgtccccacttcggggatctacttcgtatactctcagggaagctcccccccacttctctggccattccagcaactgaagtcttcgctgataaaaagccctgaattgtctaagaagtag

SEQ ID NO: 345378 - DNA, 618 bp, Artificial Sequence
  derived and/or modified sequence
atgaccccaccagagagactgttcctcccccgtgtacgtggcacgaccctccacctcctacttctgggcctcttattggtgcttttaccaggcgctcagggattgcccggtgtcggcctcactccatcagcagcacaaacagcccgacagcaccccaaaatgcacttagctcacagcaccctaaagcccgctgcccacctgattggcgaccccagcaaacagaacagcctcctgtggagagccaatacagatcgggcatttttgcaagatggattttctctgtctaacaatagtctcctggtgccgacttccggaatttactttgtgtactcacaggttgtgttctctggtaaggcctactcccccaaggcgactagctctcccctctatttggcccacgaggtgcagctattttcctcccaatatccgtttcatgtgcctctgctgtccagccaaaaaatggtatatcccggactgcaggagccttggttgcacagcatgtaccacggggctgcattccagttaactcagggcgaccagctgagtacacacaccgacgggatcccacatcttgtcctcagtcctagcacagttttcttcggggcattcgccctatag

SEQ ID NO: 345379 - DNA, 618 bp, Artificial Sequence
  derived and/or modified sequence
atgacaccaccagagagattatttttgcccagagtgagagggaccacactgcatttgctcttgctgggattgttgctcgtgctcctacccggtgctcagggcctgcccggtgtggggcttacaccttctgcggcacagaccgcaaggcagcatcccaaaatgcaccttgcccatagtactttaaagccagccgctcacttgattggtgatccctccaagcagaattctttactgtggagagctaatactgatcgtgcgtttctccaggatgggttttccctgtcaaataacagcttgctggtgccaacaagcggaatttacttcgtctacagtcaggttgtgttctccggtaaggcttacagcccaaaggccacttctagcccactttatttggctcatgaagtccagcttttctccagtcaatatccctttcacgtccctctgctgtcctcccagaagatggtctatccagggcttcaagagccctggcttcatagcatgtaccacggcgcagcattccagctaacacaaggcgaccaactgtcaacccacacagatggtattcctcacctggtactctcaccctccaccgtgtttttcggcgcttttgcactttag

SEQ ID NO: 345380 - DNA, 618 bp, Artificial Sequence
  derived and/or modified sequence
atgacccctccggaacgattgttcctaccgcgagtgcggggtacgaccttacatttactcctcctgggactgttgctcgtgctgctgcctggtgctcaaggcctgcccggtgtcggtctcacaccctccgcagcccagactgcccgacagcacccaaagatgcacttggcccatagcacactcaaacctgctgcccatctcatcggggatcctagtaaacaaaattctctcttgtggcgagctaataccgaccgcgctttcctacaggatggcttcagcctgtctaataattcactgctggtccctacctccggcatttactttgtgtactctcaggtggtgttctcagggaaggcgtattctccgaaggcaaccagttcccctctgtacctggcccacgaggtgcaactgtttagttcccagtacccctttcatgtccccctgttgagttcacagaaaatggtctacccaggcctgcaagaaccttggttgcacagcatgtaccatggggcagcctttcagttgacacagggcgaccaactgtctacacacactgatggcataccccatcttgttctctccccctctaccgtttttttcggagcttttgctctgtag

SEQ ID NO: 345381 - DNA, 618 bp, Artificial Sequence
  derived and/or modified sequence
atgacaccaccagagcgcctgttcttgcctagggtgagggggacaaccttgcacctcctgttacttggtcttttgcttgtgctgctgcctggcgcacagggattgcctggagtcgggttgacccccagcgccgctcaaacagctagacagcatccgaaaatgcacctggcccattctactttgaaaccagccgcacatctgattggcgacccatcgaaacagaatagtttgttgtggcgtgcgaatacagacagagctttcttgcaggatggattcagcctctctaataattcactcctggtcccaacttcaggtatctatttcgtgtacagtcaggtcgtgttcagtggtaaggcctatagccccaaggctacctctagccctctgtatttggcccacgaggtgcagctattttcttctcagtatccatttcacgtccctctcctcagctcccagaaaatggtatatccagggctgcaggaaccctggctccattcaatgtaccacggcgctgccttccagttgacccagggggatcaactcagtacccacaccgacggaatcccacatcttgtgctgtcaccaagcacagtcttcttcggggctttcgcactgtag

SEQ ID NO: 345382 - DNA, 417 bp, Artificial Sequence
  derived and/or modified sequence
atgacgcccccagaaaggctgttcctccccagggtgcggggtacaaccttacatctactactcctcggactgttgctcgtgctgttgcctggagcacaggggctgcctggagtgggcttaaccccaagcgctgcgcagaccgccagacagcaccctaaaatgcatctggcgcatagcactctcaagccggcagctcatttgattggtgacccttccaaacagaacagcttgctctggagggcaaataccgacagagcgttccttcaggacgggttctccctgtccaacaactcgcttctggtgccaacaagtggcatctactttgtctatagtcaaggaagcagtcctccactcttatggcctttccagcagctgaagtccagcctgattaagtctcctgagctgagcaagaagtag

SEQ ID NO: 345383 - DNA, 417 bp, Artificial Sequence
  derived and/or modified sequence
atgacccccccagagaggctctttctaccaagggtgaggggcacaaccttgcacctcctgttgctaggattgctgctcgtgctcctgccaggggcacaggggttgcctggagtcggccttactccttccgctgcccaaacagccagacagcacccgaagatgcaccttgctcatagcacattaaaacccgctgcacacttgattggcgatccttccaaacaaaattccctactctggcgcgcaaatacagatagggcctttctgcaggacggcttctctttgtccaacaatagcctgctcgtacccacctcgggtatctactttgtttactcccaggggagctctccccctctgctgtggccttttcagcagttaaagagtagcctgataaaaagcccggagctctctaagaagtag

SEQ ID NO: 345384 - protein, 216 aa, Artificial Sequence
  derived and/or modified sequence
MWPHSAGARPWASTLTGKDPRVMACWCLDGLPSGLAEPWRELWRWRSRPLHCVPPFSPLARSSRDHRNLRRRVEALPRILKGNIDGWRQNLEPSNNVEMFPPSGSTGLIPPSHFQARPLSTLPRMAPTWLSDIPLVQPPGHQDVSERRLDTQRPQVTMWERDVSSDRQEPGRRGRSWGLEGSQALSQQAEVIVRQLQELRRLEEEVRLLRETSLQQ

SEQ ID NO: 345385 - DNA, 111 bp, Artificial Sequence
  derived and/or modified sequence
atgttcccccccagcggcagcaccggcctgatcccccccagccacttccaggccagacccctgagcaccctgcccagaatggcccccacctggctgagcgacatcccctag

SEQ ID NO: 345386 - DNA, 2490 bp, Artificial Sequence
  derived and/or modified sequence
tgtggccaaagcgcagtagggggctctcgcggttggggctttctctttggaaggtggcctgaaaattgaattggagtgtctttgtttctcctcttgtccaggggaacatagatggctggagacagaatctagagccttcaaataatgtggagatgtttccaccttcaggttccactgggctgattcccccctcccactttcaagctcggcccctttcaactctgccaagaatggctcccacctggctctcagacattcccctggtccaacccccaggccatcaagatgtctcagagaggcggctagacacccagagacctcaagtgaccatgtgggaacgggatgtttccagtgacaggcaggagccagggcggagaggcaggtcctgggggctggaggggtcacaggccctgagccagcaggctgaggtgatcgttcggcagctgcaagagctgcggcggctggaggaggaggtccggctcctgcgggagacctcgctgcagcagaagatgaggctagaggcccaggccatggagctagaggctctggcacgggcggagaaggccggccgagctgaggctgagggcctgcgtgctgctttggctggggctgaggttgtccggaagaacttggaagaggggagccagcgggagctggaagaggttcagaggctgcaccaagagcagctgtcctctttgacacaggctcacgaggaggctctttccagtttgaccagcaaggctgagggcttggagaagtctctgagtagtctggaaaccagaagagcaggggaagccaaggagctggccgaggctcagagggaggccgagctgcttcggaagcagctgagcaagacccaggaagacttggaggctcaggtgaccctggttgagaatctaagaaaatatgttggggaacaagtgccttctgaggtccacagccagacatgggaactggagcgacagaagcttctggaaaccatgcagcacttgcaggaggaccgggacagcctgcatgccaccgcggagctgctgcaggtgcgggtgcagagcctcacacacatcctcgccctgcaggaggaggagctgaccaggaaggttcaaccttcagattccctggagcctgagtttaccaggaagtgccagtccctgctgaaccgctggcgggagaaggtgtttgccctcatggtgcagctaaaggcccaggagctggaacacagtgactctgttaagcagctgaagggacaggtggcctcactccaggaaaaagtgacatcccagagccaggagcaggccatcctgcagcgatccctgcaggacaaagccgcagaggtggaggtggagcgtatgggtgccaagggcctgcagttggagctgagccgtgctcaggaggccaggcgtcggtggcagcagcagacagcctcagccgaggagcagctgaggcttgtggtcaatgctgtcagcagctgtcccctaccaccaccggtcacagacgtgagccttgagttgcagcagttgcgggaagaacggaaccgcctggatgcagaactgcagctgagtgcccgcctcatccagcaggaggtgggccgggctcgggagcaaggggaggcagagcggcagcagctgagcaaggtggcccagcagctggagcaggagctgcagcagacccaggagtccctggctagcttggggctgcagctggaggtagcacgccagggccagcaggagagcacagaggaggctgccagtctgcggcaggagctgacccagcagcaggaactctacgggcaagccctgcaagaaaaggtggctgaagtggaaactcggctgcgggagcaactctcagacacagagaggaggctgaacgaggctcggagggagcatgccaaggccgtggtctccttacgccagattcagcgcagagccgcccaggaaaaggagcggagccaggaactcaggcgtctgcaggaggaggcccggaaggaggaggggcagcgactggcccggcgcttgcaggagctagagagggataagaacctcatgctggccaccttgcagcaggaaggtctcctctcccgttacaagcagcagcgactgttgacagttcttccttccctactggataagaagaaatctgtggtgtccagccccaggcctccagagtgttcagcatctgcacctgtagcagcagcagtgcccaccagggagtccataaaagggtccctctctgtcctgctcgatgacctgcaggacctgagtgaagccatttccaaagaggaagctgtttgtcaaggagacaaccttgacagatgctccagctccaatccccagatgagcagctaagcagctgacagttggagggaaagccagcctgggggctgggaggatcctggagaagtgggtggggacagaccagcccttccccatcctggggttgccctgggggataccagctgagtctgaattctgctctaaataaagacgactacag

SEQ ID NO: 345387 - DNA, 2494 bp, Artificial Sequence
  derived and/or modified sequence
gtggccaaagcgcagtagggggctctcgcggttggggctttctctttggaaggtggcctgaaaattgaattggagtgtctttgtttctcctcttgtccaggggaacatagatggctgaagacagaatctagagccttcaaataatgtggagatgtttccaccttcaggttccactgggctgattcccccctcccactttcaagctcggcccctttcaactctgccaagaatggctcccacctggctctcagacattcccctggtccaacccccaggccatcaagatgtctcagagaggcggctagacacccagagacctcaagtgaccatgtgggaacgggatgtttccagtgacaggcaggagccagggcggagaggcaggtcctgggggctggaggggtcacaggccctgagccagcaggctgaggtgatcgttcggcagctgcaagagctgcggtggctggaggaggaggtctggctcctgcgggagacctcgctgcagcagaagatgaggctagaggcccaggccatggagctagaggctctggcacgggcggagaaggccggccgagctgaggctgagggcctgcgtgctgctttggctggggctgaggttgtccggaagaacttggaagaggggaggcagcgggagctggaagaggttcagaggctgcaccaagagcagctgtcctctttgacacaggctcacgaggaggctctttccagtttgaccagcaaggctgagggcttggagaagtctctgagtagtctggaaaccagaagagcaggggaagccaaggagctggccgaggctcagagggaggccgagctgcttcggaagcagctgagcaagacccaggaagacttggaggctcaggtgaccctggttgagaatctaagaaaatatgttggggaacaagtcccttctgaggtccacagccagacatgggaactggagcgacagaagcttctggaaaccatgcagcacttgcaggaggaccgggacagcctgcatgccaccgcggagctgctgcaggtgcgggtgcagagcctcacacacatcctcgccctgcaggaggaggagctgaccaggaaggttcaaccttcagattccctggagcctgagtttaccaggaagtgccagtccctgctgaaccgctggcgggagaaggtgtttgccctcatggtgcagctaaaggcccaggagctggaacacagtgactctgttaagcagctgaagggacaggtggcctcactccaggaaaaagtgacatcccagagccaggagcaggccatcctgcagcgatccctgcaggacaaagccgcagaggtggaggtggagcgtatgggtgccaagggcctgcagttggagctgagccgtgctcaggaggccaggcgttggtggcagcagcagacagcctcagccgaggagcagttgaggcttgtggtcaatgctgtcagcagctgtcccctaccaccaccggtcacagatgtgagccttgagttgcagcagctgcgggaagaacggaaccgcctggatgcagaactgcagctgagtgcccgcctcatccagcaggaggtgggccgggctcgggagcaaggggaggcagagcggcagcagctgagcaaggtggcccagcagctggagcaggagctgcagcagacccaggagtccctggctagcttggggctgcagctggaggtagcacgccagtgccagcaggagagcacagaggaggctgccagtctgcggcaggagctgacccagcagcaggaactctacgggcaagccctgcaagaaaaggtggctgaagtggaaactcggctgcgggagcaactctcagacacagagaggaggctgaacgaggctcggagggagcatgccaaggccgtggtctccttgcgccagattcagcgcagagccgcccaggaaaaggagcggagccaggaactcaggcgtctgcaggaggaggcccggaaggaggaggggcagcgactggcccggcgcttgcaggagctagagagggataagaacctcatgctggccaccttgcagcaggaaggtctcctctcccgttacaagcagcagcgactgttgacagttcttccttccctactggataagaagaaatctgtggtgtccagccccaggcctccagagtgttcagcatctgcacctgtagcagcagcagtgcccaccagggagtccataaaagggtccctctctgtcctgctcgatgacctgcaggacctgagtgaagccatttccaaagaggaagctgtttgtcaaggagacaaccttgacagatgctccagctgcaatccccagatgagcagctaagcagctgacagttggagggaaagccagcctgggggctgggaggatcctggagaagtgggtggggacagaccagcccttccccatcctggggttgccctgggggataccagctgagtctgaattctgctctaaataaagacgactacagaagga

SEQ ID NO: 345388 - DNA, 2495 bp, Artificial Sequence
  derived and/or modified sequence
tgtggccaaagcgcagtagggggctctcgcggttggggctttctctttggaaggtggcctgaaaattgaattggagtgtctttgtttctcctcttgtccaggggaacatagatggctggagacagaatctagagccttcaaataatgtggagatgtttccaccttcaggttccactgggctgattcccccctcccactttcaagctcggcccctttcaactctgccaagaatggctcccacctggctctcagacattcccctggtccaacccccaggccatcaagatgtctcagagaggcggctagacacccagagacctcaagtgaccatgtgggaacgggatgtttccagtgacaggcaggagccagggcggagaggcaggtcctgggggctggaggggtcacaggccctgagccagcaggctgaggtgatcgttcggcagctgcaagagctgcggcggctggaggaggaggtccggctcctgcgggagacctcgctgcagcagaagatgaggctagaggcccaggccatggagctagaggctctggcacgggcggagaaggccggccgagctgaggctgagggcctgcgtgctgctttggctggggctgaggttgtccggaagaatttggaagaggggagccagcgggagctggaagaggttcagaggctgcaccaagagcagctgtcctctttgacacaggctcacgaggaggctctttccagtttgaccagcaaggctgagggcttggagaagtctctgagtagtctggaaaccagaagagcaggggaagccaaggagctggccgaggctcagagggaggccgagctgcttcggaagcagctgagcaagacccaggaagacttggaggctcaggtgaccctggttgagaatctaagaaaatatgttggggaacaagtcccttctgaggtccacagccagacatgggaactggagcgacagaagcttctggaaaccatgcagcacttgcaggaggaccgggacagcctgcatgccaccgcggagctgctgcaggtgcgggtgcagagcctcacacacatcctcgccctgcaggaggaggagctgaccaggaaggttcaaccttcagattccctggagcctgagtttaccaggaagtgccagtccctgctgaaccgctggcgggagaaggtgtttgccctcatggtgcagctaaaggcccaggagctggaacacagtgactctgttaagcagctgaagggacaggtggcctcactccaggaaaaagtgacatcccagagccaggagcaggccatcctgcagcgatccctgcaggacaaagccgcagaggtggaggtggagcgtatgggtgccaagggcctgcagttggagctgagccgtgctcaggaggccaggcgtcggtggcagcagcagacagcctcagctgaggagcagctgaggcttgtggtcaatgctgtcagcagctgtcccctaccaccaccggtcacagatgtgagccttgagttgcagcagctgcgggaagaacggaaccgcctggatgcagaactgcagctgagtgcccgcctcatccagcaggaggtgggccgggctcgggagcaaggggaggcagagcggcagcagctgagcaaggtggcccagcagctggagcaggagctgcagcagacccaggagtccctggctagcttggggctgcagctggaggtagcacgccagggccagcaggagagcacagaggaggctgccagtctgcggcaggagctgacccagcagcaggaactctacgggcaagccctgcaagaaaaggtggctgaagtggaaactcggctgcgggagcaactctcagacacagagaggaggctgaacgaggctcggagggagcatgccaaggccgtggtctccttgcgccagattcagcgcagagccgcccaggaaaaggagcggagccaggaactcaggcgtctgcaggaggaggcccggaaggaggaggggcagcgactggcccggcgcttgcaggagctagagagggataagaacctcatgctggccaccttgcagcaggaaggtctcctctcccgttacaagcagcagcgactgttgacagttcttccttccctactggataagaagaaatctgtggtgtccagccccaggcctccagagtgttcagcttctgcacctgtagcagcagcagtgcccaccagggagtccataaaagggtccctctctgtcctgctcgatgacctgcaggacctgagtgaagccatttccaaagaggaagctgtttgtcaaggagacaaccttgacagatgctccagctccaatccccagatgagcagctaagcagctgacagttggagggaaagccagcctgggggctgggaggatcctggagaagtgggtggggacagaccagcccttccccatcctggggttgccctgggggataccagctgagtctgaattctgctctaaataaagacgactacagaagga

SEQ ID NO: 345389 - DNA, 2495 bp, Artificial Sequence
  derived and/or modified sequence
agtggccaaagcgcagtagggggctctcgcggttggggctttctctttggaaggtggcctgaaaattgaattggagtgtctttgtttctcctcttgtccaggggaacatagatggctgaagacagaatctagagccttcaaataatgtggagatgtttccaccttcaggttccactgggctgattcccccctcccactttcaagctcggcccctttcaactctgccaagaatggctcccacctggctctcagacattcccctggtccaacccccaggccatcaagatgtctcagagaggcggctagacacccagagacctcaagtgaccatgtgggaacgggatgtttccagtgacaggcaggagccagggcggagaggcaggtcctgggggctggaggggtcacaggccctgagccagcaggctgaggtgatcgttcggcagctgcaagagctgcggtggctggaggaggaggtctggctcctgcgggagacctcgctgcagcagaagatgaggctagaggcccaggccatggagctagaggctctggcacgggcggagaaggccggccgagctgaggctgagggcctgcgtgctgctttggctggggctgaggttgtccggaagaacttggaagaggggaggcagcgggagctggaagaggttcagaggctgcaccaagagcagctgtcctctttgacacaggctcacgaggaggctctttccagtttgaccagcaaggctgagggcttggagaagtctctgagtagtctggaaaccagaagagcaggggaagccaaggagctggccgaggctcagagggaggccgagctgcttcggaagcagctgagcaagacccaggaagacttggaggctcaggtgaccctggttgagaatctaagaaaatatgttggggaacaagtcccttctgaggtccacagccagacatgggaactggagcgacagaagcttctggaaaccatgcagcacttgcaggaggaccgggacagcctgcatgccaccgcggagctgctgcaggtgcgggtgcagagcctcacacacatcctcgccctgcaggaggaggagctgaccaggaaggttcaaccttcagattccctggagcctgagtttaccaggaagtgccagtccctgctgaaccgctggcgggagaaggtgtttgccctcatggtgcagctaaaggcccaggagctggaacacagtgactctgttaagcagctgaagggacaggtggcctcactccaggaaaaagtgacatcccagagccaggagcaggccatcctgcagcgatccctgcaggacaaagccgcagaggtggaggtggagcgtatgggtgccaagggcctgcagttggagctgagccgtgctcaggaggccaggcgttggtggcagcagcagacagcctcagccgaggagcagttgaggcttgtggtcaatgctgtcagcagctgtcccctaccaccaccggtcacagatgtgagccttgagttgcagcagctgcgggaagaacggaaccgcctggatgcagaactgcagctgagtgcccgcctcatccagcaggaggtgggccgggctcgggagcaaggggaggcagagcggcagcagctgagcaaggtggcccagcagctggagcaggagctgcagcagacccaggagtccctggctagcttggggctgcagctggaggtagcacgccagtgccagcaggagagcacagaggaggctgccagtctgcggcaggagctgacccagcagcaggaactctacgggcaagccctgcaagaaaaggtggctgaagtggaaactcggctgcgggagcaactctcagacacagagaggaggctgaacgaggctcggagggagcatgccaaggccgtggtctccttgcgccagattcagcgcagagccgcccaggaaaaggagcggagccaggaactcaggcgtctgcaggaggaggcccggaaggaggaggggcagcgactggcccggcgcttgcaggagctagagagggataagaacctcatgctggccaccttgcagcaggaaggtctcctctcccgttacaagcagcagcgactgttgacagttcttccttccctactggataagaagaaatctgtggtgtccagccccaggcctccagagtgttcagcatctgcacctgtagcagcagcagtgcccaccagggagtccataaaagggtccctctctgtcctgctcgatgacctgcaggacctgagtgaagccatttccaaagaggaagctgtttgtcaaggagacaaccttgacagatgctccagctgcaatccccagatgagcagctaagcagctgacagttggagggaaagccagcctgggggctgggaggatcctggagaagtgggtggggacagaccagcccttccccatcctggggttgccctgggggataccagctgagtctgaattctgctctaaataaagacgactacagaagga

SEQ ID NO: 345390 - DNA, 111 bp, Artificial Sequence
  derived and/or modified sequence
atgttccctcccagcggtagtaccggcttaatccccccaagccatttccaggcgcgcccactcagtacccttcctcgcatggctcctacctggctctctgacatcccttag

SEQ ID NO: 345391 - DNA, 2495 bp, Artificial Sequence
  derived and/or modified sequence
tgtggccaaagcgcagtagggggctctcgcggttggggctttctctttggaaggtggcctgaaaattgaattggagtgtctttgtttctcctcttgtccaggggaacatagatggctgaagacagaatctagagccttcaaataatgtggagatgtttccaccttcaggttccactgggctgattcccccctcccactttcaagctcggcccctttcaactctgccaagaatggctcccacctggctctcagacattcccctggtccaacccccaggccatcaagatgtctcagagaggcggctagacacccagagacctcaagtgaccatgtgggaacgggatgtttccagtgacaggcaggagccagggcggagaggcaggtcctgggggctggaggggtcacaggccctgagccagcaggctgaggtgatcgttcggcagctgcaagagctgcggcggctggaggaggaggtccggctcctgcgggagacctcgctgcagcagaagatgaggctagaggcccaggccatggagctagaggctctggcacgggcggagaaggccggccgagctgaggctgagggcctgcgtgctgctttggctggggctgaggttgtccggaagaacttggaagaggggaggcagcgggagctggaagaggttcagaggctgcaccaagagcagctgtcctctttgacacaggctcacgaggaggctctttccagtttgaccagcaaggctgagggcttggagaagtctctgagtagtctggaaaccagaagagcaggggaagccaaggagctggccgaggctcagagggaggccgagctgcttcggaagcagctgagcaagacccaggaagacttggaggctcaggtgaccctggttgagaatctaagaaaatatgttggggaacaagtcccttctgaggtccacagccagacatgggaactggagcgacagaagcttctggacaccatgcagcacttgcaggaggaccgggacagcctgcatgccaccgcggagctgctgcaggtgcgggtgcagagcctcacacacatcctcgccctgcaggaggaggagctgaccaggaaggttcaaccttcagattccctggagcctgagtttaccaggaagtgccagtccctgctgaaccgctggcgggagaaggtgtttgccctcatggtgcagctaaaggcccaggagctggaacacagtgactctgttaagcagctgaagggacaggtggcctcactccaggaaaaagtgacatcccagagccaggagcaggccatcctgcagcgatccctgcaggacaaagccgcagaggtggaggtggagcgtatgggtgccaagggcctgcagttggagctgagccgtgctcaggaggccaggcgtcggtggcagcagcagacagcctcagccgaggagcagctgaggcttgtggtcaatgctgtcagcagctgtcccctaccaccaccggtcacagatgtgagccttgagttgcagcagctgcgggaagaacggaaccgcctggatgcagaactgcagctgagtgcccgcctcatccagcaggaggtgggccgggctcgggagcaaggggaggcagagcggcagcagctgagcaaggtggcccagcagctggagcaggagctgcagcagacccaggagtccctggctagcttggggctgcagctggaggtagcacgccagggccagcaggagagcacagaggaggctgccagtctgcggcaggagctgacccagcagcaggaactctacgggcaagccctgcaagaaaaggtggctgaagtggaaactcggctgcgggagcaactctcagacacagagaggaggctgaacgaggctcggagggagcatgccaaggccgtggtctccttgcgccagattcagcgcagagccgcccaggaaaaggagcggagccaggaactcaggcgtctgcaggaggaggcccggaaggaggaggggcagcgactggcccggcgcttgcaggagctagagagggataagaacctcatgctggccaccttgcagcaggaaggtctcctctcccgttacaagcagcagcgactgttgacagttcttccttccctactggataagaagaaatctgtggtgtccagccccaggcctccagagtgttcagcatctgcacctgtagcagcagcagtgcccaccagggagtccataaaagggtccctctctgtcctgctcgatgacctgcaggacctgagtgaagccatttccaaagaggaagctgtttgtcaaggagacaaccttgacagatgctccagctccaatccccagatgagcagctaagcagctgacagttggagggaaagccagcctgggggctgggaggatcctggagaagtgggtggggacagaccagcccttccccatcctggggttgccctgggggataccagctgagtctgaattctgctctaaataaagacgactacagaagga

SEQ ID NO: 345392 - DNA, 111 bp, Artificial Sequence
  derived and/or modified sequence
atgtttcctccttctggcagcacaggcctcatcccccccagccacttccaggcccggcccctgagcaccctgcccaggatggcccccacctggctgagtgacatcccctag

SEQ ID NO: 345393 - DNA, 111 bp, Artificial Sequence
  derived and/or modified sequence
atgttcccccccagcggcagcaccggcctgatcccccccagccactttcaagcaaggccgctatctacactcccgcggatggcgccaacttggctgagcgacatcccttag

SEQ ID NO: 345394 - DNA, 111 bp, Artificial Sequence
  derived and/or modified sequence
atgtttccaccgagcggatctacaggtctgattccacccagccactttcaggccaggccactgtcaaccctgccgcgaatggccccaacatggttgagcgatatcccctag

SEQ ID NO: 345395 - protein, 256 aa, Artificial Sequence
  derived and/or modified sequence
  misc_feature (1)..(1): Xaa can be any naturally occurring amino acid
XRLDAELQLSARLIQQEVGRAREQGEAERQQLSKVAQQLEQELQQTQESLASLGLQLEVARQGQQESTEEAASLRQELTQQQELYGQALQEKVAEVETRLREQLSDTERRLNEARREHAKAVVSLRQIQRRAAQEKERSQELRRLQEEARKEEGQRLARRLQELERDKNLMLQRLLTVLPSLLDKKKSVVSSPRPPECSASAPVAAAVPTRESIKGSLSVLLDDLQDLSEAISKEEAVCQGDNLDRCSSSNPQMSS

SEQ ID NO: 345396 - protein, 768 aa, Artificial Sequence
  derived and/or modified sequence
MFPPSGSTGLIPPSHFQARPLSTLPRMAPTWLSDIPLVQPPGHQDVSERRLDTQRPQVTMWERDVSSDRQEPGRRGRSWGLEGSQALSQQAEVIVRQLQELRRLEEEVRLLRETSLQQKMRLEAQAMELEALARAEKAGRAEAEGLRAALAGAEVVRKNLEEGSQRELEEVQRLHQEQLSSLTQAHEEALSSLTSKAEGLEKSLSSLETRRAGEAKELAEAQREAELLRKQLSKTQEDLEAQVTLVENLRKYVGEQVPSEVHSQTWELERQKLLETMQHLQEDRDSLHATAELLQVRVQSLTHILALQEEELTRKVQPSDSLEPEFTRKCQSLLNRWREKVFALMVQLKAQELEHSDSVKQLKGQVASLQEKVTSQSQEQAILQRSLQDKAAEVEVERMGAKGLQLELSRAQEARRRWQQQTASAEEQLRLVVNAVSSSQIWLETTMAKVEGAAAQLPSLNNRLSYAVRKVHTIRGLIARKLALAQLRQESCPLPPPVTDVSLELQQLREERNRLDAELQLSARLIQQEVGRAREQGEAERQQLSKVAQQLEQELQQTQESLASLGLQLEVARQGQQESTEEAASLRQELTQQQELYGQALQEKVAEVETRLREQLSDTERRLNEARREHAKAVVSLRQIQRRAAQEKERSQELRRLQEEARKEEGQRLARRLQELERDKNLMLQRLLTVLPSLLDKKKSVVSSPRPPECSASAPVAAAVPTRESIKGSLSVLLDDLQDLSEAISKEEAVCQGDNLDRCSSSNPQMSS

SEQ ID NO: 345397 - DNA, 771 bp, Artificial Sequence
  derived and/or modified sequence
tgaagactggacgccgagctgcagctgagcgccagactgatccagcaggaggtgggcagagccagagagcagggcgaggccgagagacagcagctgagcaaggtggcccagcagctggagcaggagctgcagcagacccaggagagcctggccagcctgggcctgcagctggaggtggccagacagggccagcaggagagcaccgaggaggccgccagcctgagacaggagctgacccagcagcaggagctgtacggccaggccctgcaggagaaggtggccgaggtggagaccagactgagagagcagctgagcgacaccgagagaagactgaacgaggccagaagagagcacgccaaggccgtggtgagcctgagacagatccagagaagagccgcccaggagaaggagagaagccaggagctgagaagactgcaggaggaggccagaaaggaggagggccagagactggccagaagactgcaggagctggagagagacaagaacctgatgctgcagagactgctgaccgtgctgcccagcctgctggacaagaagaagagcgtggtgagcagccccagaccccccgagtgcagcgccagcgcccccgtggccgccgccgtgcccaccagagagagcatcaagggcagcctgagcgtgctgctggacgacctgcaggacctgagcgaggccatcagcaaggaggaggccgtgtgccagggcgacaacctggacagatgcagcagcagcaacccccagatgagcagctag

SEQ ID NO: 345398 - DNA, 651 bp, Artificial Sequence
  derived and/or modified sequence
atgtggccccacagcgccggcgccagaccctgggccagcaccctgaccggcaaggaccccagagtgatggcctgctggtgcctggacggcctgcccagcggcctggccgagccctggagagagctgtggagatggagaagcagacccctgcactgcgtgccccccttcagccccctggccagaagcagcagagaccacagaaacctgagaagaagagtggaggccctgcccagaatcctgaagggcaacatcgacggctggagacagaacctggagcccagcaacaacgtggagatgttcccccccagcggcagcaccggcctgatcccccccagccacttccaggccagacccctgagcaccctgcccagaatggcccccacctggctgagcgacatccccctggtgcagccccccggccaccaggacgtgagcgagagaagactggacacccagagaccccaggtgaccatgtgggagagagacgtgagcagcgacagacaggagcccggcagaagaggcagaagctggggcctggagggcagccaggccctgagccagcaggccgaggtgatcgtgagacagctgcaggagctgagaagactggaggaggaggtgagactgctgagagagaccagcctgcagcagtag

SEQ ID NO: 345399 - DNA, 2307 bp, Artificial Sequence
  derived and/or modified sequence
atgttcccccccagcggcagcaccggcctgatcccccccagccacttccaggccagacccctgagcaccctgcccagaatggcccccacctggctgagcgacatccccctggtgcagccccccggccaccaggacgtgagcgagagaagactggacacccagagaccccaggtgaccatgtgggagagagacgtgagcagcgacagacaggagcccggcagaagaggcagaagctggggcctggagggcagccaggccctgagccagcaggccgaggtgatcgtgagacagctgcaggagctgagaagactggaggaggaggtgagactgctgagagagaccagcctgcagcagaagatgagactggaggcccaggccatggagctggaggccctggccagagccgagaaggccggcagagccgaggccgagggcctgagagccgccctggccggcgccgaggtggtgagaaagaacctggaggagggcagccagagagagctggaggaggtgcagagactgcaccaggagcagctgagcagcctgacccaggcccacgaggaggccctgagcagcctgaccagcaaggccgagggcctggagaagagcctgagcagcctggagaccagaagagccggcgaggccaaggagctggccgaggcccagagagaggccgagctgctgagaaagcagctgagcaagacccaggaggacctggaggcccaggtgaccctggtggagaacctgagaaagtacgtgggcgagcaggtgcccagcgaggtgcacagccagacctgggagctggagagacagaagctgctggagaccatgcagcacctgcaggaggacagagacagcctgcacgccaccgccgagctgctgcaggtgagagtgcagagcctgacccacatcctggccctgcaggaggaggagctgaccagaaaggtgcagcccagcgacagcctggagcccgagttcaccagaaagtgccagagcctgctgaacagatggagagagaaggtgttcgccctgatggtgcagctgaaggcccaggagctggagcacagcgacagcgtgaagcagctgaagggccaggtggccagcctgcaggagaaggtgaccagccagagccaggagcaggccatcctgcagagaagcctgcaggacaaggccgccgaggtggaggtggagagaatgggcgccaagggcctgcagctggagctgagcagagcccaggaggccagaagaagatggcagcagcagaccgccagcgccgaggagcagctgagactggtggtgaacgccgtgagcagcagccagatctggctggagaccaccatggccaaggtggagggcgccgccgcccagctgcccagcctgaacaacagactgagctacgccgtgagaaaggtgcacaccatcagaggcctgatcgccagaaagctggccctggcccagctgagacaggagagctgccccctgcccccccccgtgaccgacgtgagcctggagctgcagcagctgagagaggagagaaacagactggacgccgagctgcagctgagcgccagactgatccagcaggaggtgggcagagccagagagcagggcgaggccgagagacagcagctgagcaaggtggcccagcagctggagcaggagctgcagcagacccaggagagcctggccagcctgggcctgcagctggaggtggccagacagggccagcaggagagcaccgaggaggccgccagcctgagacaggagctgacccagcagcaggagctgtacggccaggccctgcaggagaaggtggccgaggtggagaccagactgagagagcagctgagcgacaccgagagaagactgaacgaggccagaagagagcacgccaaggccgtggtgagcctgagacagatccagagaagagccgcccaggagaaggagagaagccaggagctgagaagactgcaggaggaggccagaaaggaggagggccagagactggccagaagactgcaggagctggagagagacaagaacctgatgctgcagagactgctgaccgtgctgcccagcctgctggacaagaagaagagcgtggtgagcagccccagaccccccgagtgcagcgccagcgcccccgtggccgccgccgtgcccaccagagagagcatcaagggcagcctgagcgtgctgctggacgacctgcaggacctgagcgaggccatcagcaaggaggaggccgtgtgccagggcgacaacctggacagatgcagcagcagcaacccccagatgagcagctag

SEQ ID NO: 345400 - DNA, 771 bp, Artificial Sequence
  derived and/or modified sequence
tagcgcctggatgccgaactgcaattgagtgcacgattaattcagcaagaggtgggaagggcccgggaacaaggcgaagccgaaaggcagcagctgtcaaaggtcgcgcaacagctggagcaggaactgcagcaaacccaggagagtcttgcgtcccttggacttcagttagaggtcgcacgccaaggccagcaggagagcacggaggaggccgccagccttaggcaggaacttacacaacagcaggagctttatggccaggcattacaggagaaggtggccgaggtggagacccggttgagggagcagctatccgatactgaaaggagactgaacgaagctcggcgggaacatgccaaagccgtggttagcctcaggcagatacagagacgggcagctcaagagaaggaacgttcacaagagcttcgtagattgcaggaggaggccagaaaagaagaaggccagcgcttagcacgtcggcttcaggaactcgagcgggataaaaatttaatgctgcagcggctccttacagtcctgcccagtctgctggacaagaagaagagtgtagtgagctctccgcggccaccagaatgctctgcgtctgccccagtagcagcggcggtgccgacgagagaatccattaaggggtccctgagcgtattgctggatgatctgcaagatcttagtgaggcgatcagcaaagaagaagctgtgtgccagggggacaacttagaccgctgctcctcttcaaacccccagatgagctcatag

SEQ ID NO: 345401 - DNA, 771 bp, Artificial Sequence
  derived and/or modified sequence
tagcggctagacgcagagttacagttgagcgcaaggttgatccagcaggaggtcggaagggcacgagaacagggggaggctgagaggcagcaactgagtaaagtggctcagcagttagaacaggagttacagcagacacaggagtccctcgcgagcctaggcttgcaactcgaagtcgcaaggcagggccaacaagaatcaactgaggaagctgcatcactgcgccaagaattgacgcagcagcaagagctgtacgggcaggcgcttcaagagaaggttgcagaagtagaaacaaggcttcgcgaacagctgagtgacacggaacgacgacttaacgaagcccgccgggagcacgcgaaagctgtcgtgtcactgagacagatccagagaagagctgcccaggagaaggaaagaagtcaagagctgcgcagactgcaggaagaggctaggaaagaagaaggccagaggctcgcccggcgcttacaggaactggagagggacaaaaacctcatgcttcaacgcctgctgaccgtgcttccttctcttttagacaagaagaaaagcgtagtttcttcaccccgacccccagagtgttctgccagcgcacctgttgctgcagcagtcccaactagggaatcaattaaagggagtctgtcagtgttactggatgacctgcaggatttgtctgaagcaatcagtaaggaggaggctgtttgtcagggtgataatttggaccggtgctcttcctctaacccacaaatgtctagctag

SEQ ID NO: 345402 - DNA, 651 bp, Artificial Sequence
  derived and/or modified sequence
atgtggccccattccgctggggctagaccctgggctagcacactaactggcaaagacccacgggtgatggcatgttggtgcctggacgggctgcctagcggtttggccgagccttggcgtgagctctggcggtggagatcaaggcctttgcattgtgtgccacccttttccccgctcgctaggtctagccgggaccaccgtaatttgagacgacgggtcgaagccctcccaagaattctgaagggtaatattgatgggtggaggcaaaatctggaacctagcaataacgtggaaatgttcccaccctccgggagtactggtctgatccctccctctcatttccaggctcgacccttatccactctgcccaggatggcgcctacctggctgtccgatatccccctagtacagccacctgggcaccaggatgtgtccgaaaggagactggacactcagaggccccaggtcacaatgtgggaacgcgacgtgtcctcagatcgacaagaacctggcaggagagggcgaagctggggccttgaggggagccaagccctctcccagcaggccgaagtgatcgttagacagctgcaggagctgcggagattggaggaggaggtcaggcttttgcgcgagactagtctgcagcagtag

SEQ ID NO: 345403 - DNA, 771 bp, Artificial Sequence
  derived and/or modified sequence
tagcgcttggacgccgaactgcaactctctgcacggctcatacagcaggaagtggggcgggctcgagaacagggggaggctgagaggcagcagttatctaaggtagcccaacagctcgagcaggagctgcagcaaacccaggagtcactggcaagtctggggctacagctggaagtcgcaaggcagggccagcaggaatcaacggaggaggcggcaagcctgcggcaagagcttactcagcagcaggagctttacggccaggctttgcaggagaaggttgcagaagtcgagacccggttaagagagcagctgtcggacactgagcggcgtttgaatgaggccagaagagaacatgccaaagccgtcgtgagcctgaggcagatccagagacgggccgcccaagagaaagaacgcagccaggaactgcgacgcctgcaggaggaagccagaaaagaagagggtcagaggcttgcacgtagacttcaggagctcgaacgcgacaagaatctgatgctccaacgccttttgactgtcctgcccagcctccttgataagaagaagtccgtcgtgagcagtcccagaccccctgagtgtagcgcttccgcccccgtggctgctgcagttcctacaagagagtccataaagggcagtctgagtgtgcttctagacgacttgcaggacctgtccgaggccattagtaaagaagaggcagtgtgtcagggggacaacctcgacaggtgctcctcttccaatccacagatgagctcctag

SEQ ID NO: 345404 - DNA, 2307 bp, Artificial Sequence
  derived and/or modified sequence
atgttcccccctagcgggagtacgggtctcattccaccttctcacttccaagcaagacctctctctacactccctcggatggcccctacatggctgtccgacattccactagtgcagccgcctggccaccaggacgtgtccgaacggaggcttgatacccaacgcccacaggtcaccatgtgggaaagggacgtgagctccgacagacaggagccagggcgccggggaaggagttggggtctggagggctcccaagcgctgtcccagcaagccgaggtgatcgttcgacagctgcaagaactgcgccgactcgaagaggaggtgcggctgttacgagagacatccctccagcagaagatgcgacttgaagcccaagccatggagctggaagccttagctcgtgctgagaaggcaggccgtgcagaggctgagggcctacgggccgccctagcgggagccgaggtggtgcgcaagaacctggaggagggatctcaacgcgaactggaagaggtgcagagactccaccaggagcagctgtccagcttaactcaagcccacgaggaggccctgtcatccctgacatctaaggctgaaggcctggagaagagtctgtcgtcactcgaaacaaggcgcgcaggtgaggcaaaagagctagcggaagcccagcgagaagctgagctgctgcggaaacagctgagcaagacacaggaggaccttgaagcccaggtgaccctggtcgagaatctaagaaagtacgtaggggaacaagtcccttcagaggttcatagccaaacttgggaactcgaaaggcagaagctgctagagactatgcagcaccttcaggaggaccgtgactcccttcacgcaaccgctgaacttctgcaggtgcgtgttcagtctctgactcatatcctggccctgcaggaagaggagttgacccggaaagtgcaaccctccgactcgttggagcccgagttcacacgaaaatgtcagtccctgctcaaccgatggcgagaaaaagtgttcgcgctgatggtccagcttaaggcccaagagctggaacattctgatagcgtgaagcagctgaaaggccaagtcgccagcctgcaagaaaaggtcacctctcagtcccaagaacaggcgatcttgcaacgcagtttacaggataaagcggccgaggtagaggtggaaagaatgggcgctaagggactgcagctagaactctcccgggcacaggaagcacgtaggcgctggcagcaacagaccgcctccgcagaggaacaattgcggctcgtggtcaacgctgtcagcagctcccaaatttggctcgagaccacaatggctaaagtggagggcgctgcagcacaactgcctagtctgaacaatcgcctctcctatgccgtgagaaaggttcacacaataagaggcttgatagcccgcaagctggctctggcgcagcttagacaggagagctgccccttgcctcctcctgtgacggacgtgtccttggaacttcagcaactaagagaggagaggaatcgcttggacgctgagttacagctgagtgcccgacttattcagcaagaagtgggccgagctcgggagcagggcgaggcagaacgccagcagttgagcaaggtggcacagcagctcgagcaggaactacagcagacacaggagagtttggccagcttaggtctccagttagaagttgcccgccagggtcagcaggaaagcactgaagaggcagcttcgctccgccaggagctgacacagcagcaggagctgtatggacaggccttgcaggagaaagtggccgaggttgagaccaggctgcgcgaacagctgtcggacacagaaagaagattgaacgaggcccggagagaacatgctaaggccgtcgtgtccctccggcagatccagcgcagagccgcccaggagaaagaacgttcacaggaactacgccgtttgcaggaagaggcaagaaaagaggaaggacagaggctagcaagacgactccaagagctggagagagataaaaacctgatgctccaacggctgctgacagtcctgccctccctcctggataaaaaaaagtctgttgtgtcatcaccaaggccaccagaatgctccgcgtcagccccagtggccgccgcggtgcccacgagagagtccatcaaaggatctctgagcgttctgttagacgatttgcaagatctgtccgaggcaatctctaaggaagaagctgtgtgccagggggacaacctggatagatgctcctcttccaatccacaaatgagctcctag

SEQ ID NO: 345405 - DNA, 922 bp, Artificial Sequence
  derived and/or modified sequence
ccgcctggatgcagaactgcagctgagtgcccgcctcatccagcaggaggtgggccgggctcgggagcaaggggaggcagagcggcagcagctgagcaaggtggcccagcagctggagcaggagctgcagcagacccaggagtccctggctagcttggggctgcagctggaggtagcacgccagggccagcaggagagcacagaggaggctgccagtctgcggcaggagctgacccagcagcaggaactctacgggcaagccctgcaagaaaaggtggctgaagtggaaactcggctgcgggagcaactctcagacacagagaggaggctgaacgaggctcggagggagcatgccaaggccgtggtctccttgcgccagattcagcgcagagccgcccaggaaaaggagcggagccaggaactcaggcgtctgcaggaggaggcccggaaggaggaggggcagcgactggcccggcgcttgcaggagctagagagggataagaacctcatgctgcagcgactgttgacagttcttccttccctactggataagaagaaatctgtggtgtccagccccaggcctccagagtgttcagcttctgcacctgtagcagcagcagtgcccaccagggagtccataaaagggtccctctctgtcctgctcgatgacctgcaggacctgagtgaagccatttccaaagaggaagctgtttgtcaaggagacaaccttgacagatgctccagctccaatccccagatgagcagctaagcagctgacagttggagggaaagccagcctgggggctgggaggatcctggagaagtgggtggggacagaccagcccttccccatcctggggttgccctgggggataccagctgagtctgaattctgctctaaataaagacgactacagaagga

SEQ ID NO: 345406 - DNA, 651 bp, Artificial Sequence
  derived and/or modified sequence
atgtggcctcacagtgccggcgccaggccctgggcgtctacgctcactggcaaagatccgcgggtgatggcgtgctggtgtctggacggcctgcctagtggactagcggaaccatggagggaactgtggcgttggagatccaggccactacattgcgtgccgccattctctccacttgcccgaagttctagagaccaccgtaatctgagaagaagagtcgaggccctaccacggatcctgaaggggaatattgacggatggagacagaacctggagcctagcaataatgtggagatgtttccgccctcaggcagcacagggctgatcccaccgagtcatttccaggcccgcccactgtctaccctgcccaggatggccccgacatggttgagtgatatccctttggtacagcccccaggacatcaggacgtgagtgagcggcgtctggacacacagcgccctcaggtcaccatgtgggagcgggacgtttctagcgataggcaggaaccaggaaggaggggtcgtagctggggcctggagggctcccaggctcttagccagcaggcagaagtgatagtgaggcagctgcaggaactgcggaggctcgaggaggaggttaggcttcttcgggagacttccctgcagcagtag

SEQ ID NO: 345407 - DNA, 922 bp, Artificial Sequence
  derived and/or modified sequence
ccgcctggatgcagaactgcagctgagtgcccgcctcatccagcaggaggtgggccgggctcgggagcaaggggaggcagagcggcagcagctgagcaaggtggcccagcagctggagcaggagctgcagcagacccaggagtccctggctagcttggggctgcagctggaggtagcacgccagggccagcaggagagcacagaggaggctgccagtctgcggcaggagctgacccagcagcaggaactctacgggcaagccctgcaagaaaaggtggctgaagtggaaactcggctgcgggagcaactctcagacacagagaggaggctgaacgaggctcggagggagcatgccaaggccgtggtctccttgcgccagattcagcgcagagccgcccaggaaaaggagcggagccaggaactcaggcgtctgcaggaggaggcccggaaggaggaggggcagcgactggcccggcgcttgcaggagctagagagggataagaacctcatgctgcagcgactgttgacagttcttccttccctactggataagaagaaatctgtggtgtccagccccaggcctccagagtgttcagcatctgcacctgtagcagcagcagtgcccaccagggagtccataaaagggtccctctctgtcctgctcgatgacctgcaggacctgagtgaagccatttccaaagaggaagctgtttgtcaaggagacaaccttgacagatgctccagctccaatccccagatgagcagctaagcagctgacagttggagggaaagccagcctgggggctgggaggatcctggagaagtgggtggggacagaccagcccttccccatcctggggttgccctgggggataccagctgagtctgaattctgctctaaataaagacgactacagaagga

SEQ ID NO: 345408 - DNA, 838 bp, Artificial Sequence
  derived and/or modified sequence
tgcccactatgtgttaggactcgagaaagaggaggcgggcagcaggcatggaagctaaggggatagtagagagaagctgagagaacagccgcaggaaagatttgaataagatgtcaggacgctggcttttctgcctggggatctaggcggcctggattcccaaggtcttggggagggtctagccctgcatgtggccacattcagctggggccaggccttgggccagcactttaacagggaaggacccaagagtcatggcctgctggtgtctggatgggcttccctcaggccttgctgagccatggagagaactctggagatggcgctcaagacccctgcactgtgtacctcctttctcacctctggccaggagcagcagggaccatagaaacttaaggaggagggtagaggcactgcccagaatcctgaaagggaacatagatggctggagacagaatctagagccttcaaataatgtggagatgtttccaccttcaggttccactgggctgattcccccctcccactttcaagctcggcccctttcaactctgccaagaatggctcccacctggctctcagacattcccctggtccaacccccaggccatcaagatgtctcagagaggcggctagacacccagagacctcaagtgaccatgtgggaacgggatgtttccagtgacaggcaggagccagggcggagaggcaggtcctgggggctggaggggtcacaggccctgagccagcaggctgaggtgatcgttcggcagctgcaagagctgcggcggctggaggaggaggtccggctcctgcgggagacctcgctgcagcagaa

SEQ ID NO: 345409 - DNA, 838 bp, Artificial Sequence
  derived and/or modified sequence
tgcccactatgtgttaggactcgagaaagaggaggcgggcagcaggcatggaagctaaggggatagtagagagaagctgagagaacagccgcaggaaagatttgaataagatgtcaggacgctggcttttctgcctggggatctaggcggcctggattcccaaggtcttggggagggtctagccctgcatgtggccacattcagctggggccaggccttgggccagcactttaacagggaaggacccaagagtcatggcctgctggtgtctggatgggcttccctcaggccttgctgagccatggagagaactctggagatggcgctcaagacccctgcactgtgtacctcctttctcacctctggccaggagcagcagggaccatagaaacttaaggaggagggtaaaggcactgcccagaatcctgaaagggaacatagatggctgaagacagaatctagagccttcaaataatgtggagatgtttccaccttcaggttccactgggctgattcccccctcccactttcaagctcggcccctttcaactctgccaagaatggctcccacctggctctcagacattcccctggtccaacccccaggccatcaagatgtctcagagaggcggctagacacccagagacctcaagtgaccatgtgggaacgggatgtttccagtgacaggcaggagccagggcggagaggcaggtcctgggggctggaggggtcacaggccctgagccagcaggctgaggtgatcgttcggcagctgcaagagctgcggcggctggaggaggaggtccggctcctgcgggagacctcgctgcagcagaa

SEQ ID NO: 345410 - DNA, 700 bp, Artificial Sequence
  derived and/or modified sequence
agggggtacaggggccaggtgaagggacagatgaagagatcagaacagccttagagctcacgggctaactgggtgaagcctctggggaacatagatggctgaagacagaatctagagccttcaaataatgtggagatgtttccaccttcaggttccactgggctgattcccccctcccactttcaagctcggcccctttcaactctgccaagaatggctcccacctggctctcagacattcccctggtccaacccccaggccatcaagatgtctcagagaggcggctagacacccagagacctcaagtgaccatgtgggaacgggatgtttccagtgacaggcaggagccagggcggagaggcaggtcctgggggctggaggggtcacaggccctgagccagcaggctgaggtgatcgttcggcagctgcaagagctgcggtggctggaggaggaggtctggctcctgcgggagacctcgctgcagcagaagatgaggctagaggcccaggccatggagctagaggctctggcacgggcggagaaggccggccgagctgaggctgagggcctgcgtgctgctttggctggggctgaggttgtccggaagaacttggaagaggggaggcagcgggagctggaagaggttcagaggctgcaccaagagcagctgtcctctttgacacaggctcacgaggagg

SEQ ID NO: 345411 - DNA, 2581 bp, Artificial Sequence
  derived and/or modified sequence
agtagggggctctcgcggttggtaaggggctttctctttggaaggtggcctgaaaattgaattggagtgtctttgtttctcctcttgtccaggggaacatagatggctggagacagaatctagagccttcaaataatgtggagatgtttccaccttcaggttccactgggctgattcccccctcccactttcaagctcggcccctttcaactctgccaagaatggctcccacctggctctcagacattcccctggtccaacccccaggccatcaagatgtctcagagaggcggctagacacccagagacctcaagtgaccatgtgggaacgggatgtttccagtgacaggcaggagccagggcggagaggcaggtcctgggggctggaggggtcacaggccctgagccagcaggctgaggtgatcgttcggcagctgcaagagctgcggcggctggaggaggaggtccggctcctgcgggagacctcgctgcagcagaagatgaggctagaggcccaggccatggagctagaggctctggcacgggcggagaaggccggccgagctgaggctgagggcctgcgtgctgctttggctggggctgaggttgtccggaagaacttggaagaggggagccagcgggagctggaagaggttcagaggctgcaccaagagcagctgtcctctttgacacaggctcacgaggaggctctttccagtttgaccagcaaggctgagggcttggagaagtctctgagtagtctggaaaccagaagagcaggggaagccaaggagctggccgaggctcagagggaggccgagctgcttcggaagcagctgagcaagacccaggaagacttggaggctcaggtgaccctggttgagaatctaagaaaatatgttggggaacaagtgccttctgaggtccacagccagacatgggaactggagcgacagaagcttctggaaaccatgcagcacttgcaggaggaccgggacagcctgcatgccaccgcggagctgctgcaggtgcgggtgcagagcctcacacacatcctcgccctgcaggaggaggagctgaccaggaaggttcaaccttcagattccctggagcctgagtttaccaggaagtgccagtccctgctgaaccgctggcgggagaaggtgtttgccctcatggtgcagctaaaggcccaggagctggaacacagtgactctgttaagcagctgaagggacaggtggcctcactccaggaaaaagtgacatcccagagccaggagcaggccatcctgcagcgatccctgcaggacaaagccgcagaggtggaggtggagcgtatgggtgccaagggcctgcagttggagctgagccgtgctcaggaggccaggcgtcggtggcagcagcagacagcctcagccgaggagcagctgaggcttgtggtcaatgctgtcagcagctctcagatctggctcgagaccaccatggctaaggtggaaggggctgccgcccagcttcccagcctcaacaaccgactcagctatgctgtccgcaaggtccacaccattcggggcctgattgctcgaaagcttgcccttgctcagctgcgccaggagagctgtcccctaccaccaccggtcacagacgtgagccttgagttgcagcagttgcgggaagaacggaaccgcctggatgcagaactgcagctgagtgcccgcctcatccagcaggaggtgggccgggctcgggagcaaggggaggcagagcggcagcagctgagcaaggtggcccagcagctggagcaggagctgcagcagacccaggagtccctggctagcttggggctgcagctggaggtagcacgccagggccagcaggagagcacagaggaggctgccagtctgcggcaggagctgacccagcagcaggaactctacgggcaagccctgcaagaaaaggtggctgaagtggaaactcggctgcgggagcaactctcagacacagagaggaggctgaacgaggctcggagggagcatgccaaggccgtggtctccttacgccagattcagcgcagagccgcccaggaaaaggagcggagccaggaactcaggcgtctgcaggaggaggcccggaaggaggaggggcagcgactggcccggcgcttgcaggagctagagagggataagaacctcatgctgcagcgactgttgacagttcttccttccctactggataagaagaaatctgtggtgtccagccccaggcctccagagtgttcagcatctgcacctgtagcagcagcagtgcccaccagggagtccataaaagggtccctctctgtcctgctcgatgacctgcaggacctgagtgaagccatttccaaagaggaagctgtttgtcaaggagacaaccttgacagatgctccagctccaatccccagatgagcagctaagcagctgacagttggagggaaagccagcctgggggctgggaggatcctggagaagtgggtggggacagaccagcccttccccatcctggggttgccctgggggataccagctgagtctgaattctgctcta

SEQ ID NO: 345412 - DNA, 838 bp, Artificial Sequence
  derived and/or modified sequence
tgcccactatgtgttaggactcgagaaagaggaggcgggcagcaggcatggaagctaaggggatagtagagagaagctgagagaacagccgcaggaaagatttgaataagatgtcaggacgctggcttttctgcctggggatctaggcggcctggattcccaaggtcttggggagggtctagccctgcatgtggccacattcagctggggccaggccttgggccagcactttaacagggaaggacccaagagtcatggcctgctggtgtctggatgggcttccctcaggccttgctgagccatggagagaactctggagatggcgctcaagacccctgcactgtgtacctcctttctcacctctggccaggagcagcagggaccatagaaacttaaggaggagggtaaaggcactgcccagaatcctgaaagggaacatagatggctgaagacagaatctagagccttcaaataatgtggagatgtttccaccttcaggttccactgggctgattcccccctcccactttcaagctcggcccctttcaactctgccaagaatggctcccacctggctctcagacattcccctggtccaacccccaggccatcaagatgtctcagagaggcggctagacacccagagacctcaagtgaccatgtgggaacgggatgtttccagtgacaggcaggagccagggcggagaggcaggtcctgggggctggaggggtcacaggccctgagccagcaggctgaggtgatcgttcggcagctgcaagagctgcggtggctggaggaggaggtctggctcctgcgggagacctcgctgcagcagaa

SEQ ID NO: 345413 - DNA, 560 bp, Artificial Sequence
  derived and/or modified sequence
aaagcgcagtagggggctctcgcggggctttctctttggaaggtggcctgaaaattgaattggagtgtctttgtttctcctcttgtccaggggaacatagatggctggagacagaatctagagccttcaaataatgtggagatgtttccaccttcaggttccactgggctgattcccccctcccactttcaagctcggcccctttcaactctgccaagaatggctcccacctggctctcagacattcccctggtccaacccccaggccatcaagatgtctcagagaggcggctagacacccagagacctcaagtgaccatgtgggaacgggatgtttccagtgacaggcaggagccagggcggagaggcaggtcctgggggctggaggggtcacaggccctgagccagcaggctgaggtgatcgttcggcagctgcaagagctgcggcggctggaggaggaggtccggctcctgcgggagacctcgctgcagcagaagatgaggctagaggcccaggccatggagctagaggctctggcacgggcggagaaggccggccg

SEQ ID NO: 345414 - DNA, 544 bp, Artificial Sequence
  derived and/or modified sequence
gcagtagggggctctcgcggttggccttgctgagccatggagagaactctggagatggcgctcaagacccctgcactgtgtacctcctttctcacctctggccaggagcagcagggaccatagaaacttaaggaggagggggctttctctttggaaggtggcctgaaaattgaattggagtgtctttgtttctcctcttgtccaggggaacatagatggctggagacagaatctagagccttcaaataatgtggagatgtttccaccttcaggttccactgggctgattcccccctcccactttcaagctcggcccctttcaactctgccaagaatggctcccacctggctctcagacattcccctggtccaacccccaggccatcaagatgtctcagagaggcggctagacacccagagacctcaagtgaccatgtgggaacgggatgtttccagtgacaggcaggagccagggcggagaggcaggtcctgggggctggaggggtcacaggccctgagccagcaggctgaggtgatcgttcgg

SEQ ID NO: 345415 - DNA, 588 bp, Artificial Sequence
  derived and/or modified sequence
aggggccaggtgaagggacagatgaagagatcagaacagccttagagctcacgggctaactgggggaacatagatggctggagacagaatctagagccttcaaataatgtggagatgtttccaccttcaggttccactgggctgattcccccctcccactttcaagctcggcccctttcaactctgccaagaatggctcccacctggctctcagacattcccctggtccaacccccaggccatcaagatgtctcagagaggcggctagacacccagagacctcaagtgaccatgtgggaacgggatgtttccagtgacaggcaggagccagggcggagaggcaggtcctgggggctggaggggtcacaggccctgagccagcaggctgaggtgatcgttcggcagctgcaagagctgcggcggctggaggaggaggtccggctcctgcgggagacctcgctgcagcagaagatgaggctagaggcccaggccatggagctagaggctctggcacgggcggagaaggccggccgagctgaggctgagggcctgcgtgctgctttggctggggctgaggttgtccggaag

SEQ ID NO: 345416 - DNA, 589 bp, Artificial Sequence
  derived and/or modified sequence
gaggcgtagggggtgtggccaaagcgcagtagggggctctcgcggttggccttgctgagccatggagagaactctggagatggcgctcaagacccctgcactgtgtacctcctttctcacctctggccaggagcagcagggaccatagaaacttaaggaggagggtagaggcactgcccagaatcctgaaagggaacatagatggctggagacagaatctagagccttcaaataatgtggagatgtttccaccttcaggttccactgggctgattcccccctcccactttcaagctcggcccctttcaactctgccaagaatggctcccacctggctctcagacattcccctggtccaacccccaggccatcaagatgtctcagagaggcggctagacacccagagacctcaagtgaccatgtgggaacgggatgtttccagtgacaggcaggagccagggcggagaggcaggtcctgggggctggaggggtcacaggccctgagccagcaggctgaggtgatcgttcggcagctgcaagagctgcggcggctggaggaggaggtccggctcctgcgggagacctcgct

SEQ ID NO: 345417 - DNA, 479 bp, Artificial Sequence
  derived and/or modified sequence
gacgttcgggaagagtcggttgggggcgggaaggggctgagcgggggtcctgggagggttcaaggggtccaaaggggaagggggtacaggggccaggtgaagggacagatgaagagatcagaacagccttagagctcacgggctaactgggtgaagcctcgggccttgctgagccatggagagaactctggagatggcgctcaagacccctgcactgtgtacctcctttctcacctctggccaggagcagcagggaccatagaaacttaaggaggagggtagaggcactgcccagaatcctgaaagggaacatagatggctggagacagaatctagagccttcaaataatgtggagatgtttccaccttcaggttccactgggctgattcccccctcccactttcaagctcggcccctttcaactctgccaagaatggctcccacctggctctcagacattcccctggtccaaccccca

SEQ ID NO: 345418 - DNA, 561 bp, Artificial Sequence
  derived and/or modified sequence
aaagcgcagtagggggctctcgcggttggtaaggggaacatagatggctggagacagaatctagagccttcaaataatgtggagatgtttccaccttcaggttccactgggctgattcccccctcccactttcaagctcggcccctttcaactctgccaagaatggctcccacctggctctcagacattcccctggtccaacccccaggccatcaagatgtctcagagaggcggctagacacccagagacctcaagtgaccatgtgggaacgggatgtttccagtgacaggcaggagccagggcggagaggcaggtcctgggggctggaggggtcacaggccctgagccagcaggctgaggtgatcgttcggcagctgcaagagctgcggcggctggaggaggaggtccggctcctgcgggagacctcgctgcagcagaagatgaggctagaggcccaggccatggagctagaggctctggcacgggcggagaaggccggccgagctgaggctgagggcctgcgtgctgctttggctggggctgaggttgtccggaagaac

SEQ ID NO: 345419 - DNA, 771 bp, Artificial Sequence
  derived and/or modified sequence
tgaagactggatgctgagctgcagctgagcgcccggctcatccagcaggaggtgggccgggcccgggagcagggcgaggccgagcggcagcagctgagcaaggtggcccagcagctggagcaggagctgcagcagacccaggagagcctggccagcctgggcctgcagctggaggtggcccggcagggccagcaggagagcacagaggaggccgccagcctgcggcaggagctgacccagcagcaggagctgtatggccaggccctgcaggagaaggtggccgaggtggagacccggctgcgggagcagctgagtgacacagaaagaaggctgaatgaggcccggcgggagcacgccaaggctgtggtgtccctgcggcagatccagaggcgggccgcccaggagaaggagaggagccaggagctgcggcggctgcaggaggaggccaggaaggaggagggccagaggctggcccggcggctgcaggagctggagcgggacaagaacctgatgctgcagaggctgctgactgtgctgcccagcctgctggacaagaagaagtctgtggtgagcagcccccggcccccagaatgttctgccagcgcccctgtggccgctgctgtgcccacccgggagagcatcaagggcagcctgtctgtgctgctggatgacctgcaggacctgtctgaggccatcagcaaggaggaggccgtgtgccagggcgacaacctggaccgctgcagcagcagcaacccccagatgagcagctag

SEQ ID NO: 345420 - DNA, 651 bp, Artificial Sequence
  derived and/or modified sequence
atgtggccccacagcgctggggcccggccctgggccagcaccctgaccgggaaggacccccgggtgatggcctgctggtgcctggatggcctgcccagcggcctggccgagccctggagggagctgtggcgctggaggagccggcccctgcactgtgtgccccccttcagccccctggcccggagcagccgggaccacaggaacctgcggaggagagtggaggccctgccccgcatcctgaagggcaacattgatggctggaggcagaacctggagcccagcaacaacgtggagatgtttcctccttctggcagcacaggcctcatcccccccagccacttccaggcccggcccctgagcaccctgcccaggatggcccccacctggctgagtgacatccccctggtgcagcccccaggccaccaggatgtgtctgaaagaaggctggacacccagaggccccaggtgaccatgtgggagagagatgtgtccagtgaccggcaggagcccggccggcggggccgctcctggggcctggagggcagccaggccctgagccagcaggccgaggtgattgtgcggcagctgcaggagctgcggcggctggaggaggaggtgcggctgctgcgggagaccagcctgcagcagtag

SEQ ID NO: 345421 - DNA, 2307 bp, Artificial Sequence
  derived and/or modified sequence
atgtttcctccttctggcagcacaggcctcatcccccccagccacttccaggcccggcccctgagcaccctgcccaggatggcccccacctggctgagtgacatccccctggtgcagcccccaggccaccaggatgtgtctgaaagaaggctggacacccagaggccccaggtgaccatgtgggagagagatgtgtccagtgaccggcaggagcccggccggcggggccgctcctggggcctggagggcagccaggccctgagccagcaggccgaggtgattgtgcggcagctgcaggagctgcggcggctggaggaggaggtgcggctgctgcgggagaccagcctgcagcagaagatgaggctggaggcccaggccatggagctggaggccctggcccgggcagagaaggccggccgggcagaggccgagggcctgcgggccgccctggccggggctgaggtggtgaggaagaacctggaggagggcagccagcgggagctggaggaggtgcagaggctgcaccaggagcagctgagcagcctgacccaggcccacgaggaggccctgagcagcctgaccagcaaggccgagggcctggagaagagcctgagcagcctggagacccggcgggccggggaggccaaggagctggccgaggcccagcgggaggccgagctgctgaggaagcagctgagcaagacccaggaggacctggaggcccaggtgaccctggtggagaacctgaggaaatatgtgggggagcaggtgcccagcgaggtgcacagccagacctgggagctggagcggcagaagctgctggagaccatgcagcacctgcaggaggaccgggacagcctgcacgccacagctgagctgctgcaggtgcgggtgcagagcctgacccacatcctggccctgcaggaggaggagctgaccaggaaggtgcagcccagcgacagcctggagcctgagttcaccaggaagtgccagagcctgctgaaccgctggagggagaaggtgtttgccctgatggtgcagctgaaggcccaggagctggagcacagcgacagcgtgaagcagctgaagggccaggtggccagcctgcaggagaaggtgaccagccagagccaggagcaggccatcctgcagaggagcctgcaggacaaggctgctgaggtggaggtggagaggatgggcgccaagggcctgcagctggagctgagccgggcccaggaggcccggcggcgctggcagcagcagacagccagcgctgaggagcagctgcggctggtggtgaatgctgtgagcagcagccagatctggctggagaccaccatggccaaggtggagggcgccgccgcccagctgcccagcctgaacaaccggctgtcctatgctgtgaggaaggtgcacaccatccggggcctcatcgccaggaagctggccctggcccagctgcggcaggagagctgccccctgcccccacctgtgacagatgtgtccctggagctgcagcagctgcgggaggagaggaaccggctggatgctgagctgcagctgagcgcccggctcatccagcaggaggtgggccgggcccgggagcagggcgaggccgagcggcagcagctgagcaaggtggcccagcagctggagcaggagctgcagcagacccaggagagcctggccagcctgggcctgcagctggaggtggcccggcagggccagcaggagagcacagaggaggccgccagcctgcggcaggagctgacccagcagcaggagctgtatggccaggccctgcaggagaaggtggccgaggtggagacccggctgcgggagcagctgagtgacacagaaagaaggctgaatgaggcccggcgggagcacgccaaggctgtggtgtccctgcggcagatccagaggcgggccgcccaggagaaggagaggagccaggagctgcggcggctgcaggaggaggccaggaaggaggagggccagaggctggcccggcggctgcaggagctggagcgggacaagaacctgatgctgcagaggctgctgactgtgctgcccagcctgctggacaagaagaagtctgtggtgagcagcccccggcccccagaatgttctgccagcgcccctgtggccgctgctgtgcccacccgggagagcatcaagggcagcctgtctgtgctgctggatgacctgcaggacctgtctgaggccatcagcaaggaggaggccgtgtgccagggcgacaacctggaccgctgcagcagcagcaacccccagatgagcagctag

SEQ ID NO: 345422 - DNA, 771 bp, Artificial Sequence
  derived and/or modified sequence
tgacggctggacgccgagctgcagctgagcgcccggctgatccagcaagaggtcggccgcgctcgggagcagggcgaggcagagcgccagcagctatcaaaggttgcccagcagctagagcaggagctgcagcagacccaggaaagcctggctagtcttgggcttcagctcgaggtggccaggcaagggcagcaagagtccacagaggaggccgctagcctccggcaggaactaacccagcagcaggaactgtacggccaggctctccaggaaaaggtcgcagaggtggaaactagactaagagagcaactgagcgacacagaacggagacttaatgaagcccgaagagagcacgccaaggccgtagtttctcttagacagatccagcgtagagccgcgcaggagaaggaaagaagccaggaactgcgcaggcttcaggaggaagcccgtaaggaagaagggcagaggctggcccggcggttgcaggaattggagcgagacaagaacctgatgctgcaaagactgttgacagttctcccctccctgcttgataaaaagaagagcgtggtgtcatcccccagaccacccgaatgttccgcctccgctcccgtggcagctgctgtccccactcgcgaatccatcaaaggcagcctgtccgtcctgttggacgatctccaggatctgagtgaggcgatctccaaggaggaagccgtgtgccagggggacaacctggaccgctgttcttccagcaatccccaaatgagttcctag

SEQ ID NO: 345423 - DNA, 771 bp, Artificial Sequence
  derived and/or modified sequence
tgacggctggacgccgagctgcagctgagcgcccggctgatccagcaggaagtaggccgggcaagggagcagggtgaggctgagcgccagcagctgtctaaagtagctcagcagctggagcaggagctccagcagacacaggaatctcttgctagcttaggactgcaactcgaagtcgccaggcaaggccaacaagaatccacagaagaagctgccagcctgcgccaggaactgacacaacagcaagaactgtacggacaagccctacaagaaaaagtagcagaagtggagacgagactaagggagcagttaagcgataccgagcgtcggctcaacgaggccaggagagaacatgccaaagccgtcgtatcattgcggcagatacagcggagggcggctcaggaaaaggagaggtcccaggaactcaggcggctgcaagaagaggcaagaaaagaagagggccagcgattggcacgtaggctgcaggagctggagcgggacaagaatctgatgttgcaacggctgctcaccgtgctccccagtttgctggacaaaaagaagagtgtggttagctctcctaggcctcctgagtgtagcgcttcagcccccgtggccgcagctgtaccaacccgcgaatccattaaagggagcctttccgtgctcctcgacgatctgcaggacctctcggaagcgatttctaaggaagaggccgtttgccagggagataatctggataggtgtagctctagtaacccccaaatgtcttcctag

SEQ ID NO: 345424 - DNA, 651 bp, Artificial Sequence
  derived and/or modified sequence
atgtggccccacagcgccggcgcccggccctgggccagcaccctgaccgggaaggatccaagagtgatggcttgctggtgtttggacggcttgccttccggcctggcggagccttggagggagctgtggcggtggagaagcaggcccttgcattgcgtgccaccattttccccactagcccgttcttcgagagaccaccgcaacctgcggagacgcgtggaggccttgcctcggattctaaaaggtaatatcgatggctggagacagaatctggagccctccaacaacgttgagatgtttcctccgtcaggctctacagggctgattcctccaagtcatttccaagcacggccattgagcactctgcccagaatggcaccaacgtggttgtcagacatacctttagtccagcctcctgggcatcaggatgtgtccgaaaggcggctggatacccaacgtccccaggtaacgatgtgggaacgagacgtgagctctgatcgacaagagcctgggagaagaggtaggtcctggggcctggaaggaagtcaggcacttagccagcaggcagaggttatcgtgaggcagctacaagagttaaggaggctcgaagaggaggtccggctgttgcgcgaaacctctctacagcagtag

SEQ ID NO: 345425 - DNA, 771 bp, Artificial Sequence
  derived and/or modified sequence
tgacggctggacgccgagctgcagctgagcgcccggctgatccagcaagaagtgggccgtgcccgtgaacagggcgaagccgaacgacagcaactgagtaaggttgcacaacagcttgaacaggagctacagcaaactcaggaatccctggctagtctgggactccaacttgaggtcgccagacaggggcagcaggagagcacggaggaggctgcaagcctccggcaggagctgacccagcagcaagagctgtacggtcaggccctgcaagagaaagtcgccgaagtggagaccagattgagagagcagctttccgacaccgaacgacgtcttaatgaagcccgcagagagcatgccaaggccgttgtgtccctcaggcagattcagaggagagcagcccaggagaaggagcgatcccaagagcttaggcgcctgcaggaagaggcgagaaaagaggaaggccagcgccttgcacgcaggctgcaagaactggagagagacaagaacctcatgttgcagcgactgctgactgtactcccatctctgctggataagaaaaagtcggtagtctcatcacccaggcctccagaatgctctgcctcggccccagtcgcggccgcagttccgacccgcgagagtatcaagggatcccttagcgtgctgcttgacgatttgcaggatctatccgaggctatcagcaaggaggaggcagtgtgtcagggagacaacctagacaggtgtagttcatcaaatccacaaatgagctcttag

SEQ ID NO: 345426 - DNA, 2307 bp, Artificial Sequence
  derived and/or modified sequence
atgttcccccccagcggcagcaccggcctgatcccccccagccacttccaagcacgcccccttagcactctaccgaggatggcccctacctggctgtctgatatcccccttgtacaacctcctggccatcaagatgtcagcgagaggagactagacacccaacgcccccaggtcaccatgtgggaacgtgacgttagcagcgacagacaagaaccgggtagaaggggacgcagctgggggctggaaggaagccaggccctcagccagcaagcagaggtaatcgtgcgacaactgcaggagctgaggcgcctcgaggaggaagtgagactcctgagagagactagccttcagcagaagatgcggcttgaagcccaggcgatggagttggaggccctggcccgagcagagaaggccggtcgagcagaggccgaaggcctccgtgccgccctcgccggcgccgaggtggtgcgcaaaaacctggaggaaggaagtcagcgcgagctggaagaagtccagagactccatcaggagcagctgagctccctgacacaagcccatgaggaagccctgagctccttaacaagcaaggctgagggcctcgaaaagtctctttcctcactggagacccgtagggcgggcgaagctaaggaactcgctgaggcccagagggaagcagaattgctccggaagcagctttccaagacccaggaggatctcgaagctcaggttacactggtggagaaccttagaaagtatgtgggtgagcaggtgcccagcgaagtgcattctcaaacctgggagttggagcggcagaagcttctcgaaaccatgcagcacttgcaggaggaccgagacagccttcatgctacggcggaactcctacaggtaagagtgcagagcttaacccacattttagcgctccaagaagaagagctgactagaaaggtccaaccctccgatagtttggaacctgaattcactaggaaatgtcaaagtctgcttaaccgctggagggagaaggttttcgctctcatggtgcaactgaaggctcaagaactggaacacagcgacagtgtgaagcagctaaaaggacaggttgccagcctccaagaaaaagtcacttcgcagtcccaggagcaggctatcctccagcggagcttgcaagacaaagctgctgaagtggaagtggaaaggatgggagcaaaaggtctgcagctggagctgtcacgcgcgcaggaggctcgccgtagatggcagcagcaaactgcctctgccgaggaacagctccgcctggtcgttaacgccgtgtcctcgagccagatctggctcgaaacaacaatggctaaggtggagggggctgctgcccagttaccgtctctcaacaataggctcagttatgctgtccgcaaagttcacactatcagaggactcatcgctcggaaactggccctggctcaactgcgccaagagtcctgcccacttcccccaccagttaccgacgtgagtttagagttgcaacagttgcgcgaggagcgtaaccgccttgatgccgagttgcaattgtccgcccgcctaatccaacaggaggttgggagggccagagagcaaggggaagccgagcgccagcagctgagcaaagtcgcccagcagctagaacaagagctgcagcagactcaggagtcactagcctctttagggttacaactcgaagtagcaaggcaggggcagcaggagagcacagaagaagcggcatcactgaggcaagagctaacacagcagcaagaactgtacggccaagccttgcaggaaaaagttgccgaagtcgaaacccggctgcgggagcaactgtctgatactgaaagacggttgaatgaggcacggagagaacatgctaaggctgtcgtgtcactgcgccagattcagcggcgggcggcacaggagaaggagagatcacaggagttacgcaggctccaggaagaagctcgcaaagaggaaggccagaggctggccaggagactgcaggaactggagagagataagaacctgatgctccagagactgctcacggtgcttccttccctgttagacaaaaagaaatctgtggtgtccagtccccgcccgcctgaatgcagtgcgtcggcccccgtcgctgctgctgtgcccactcgcgaatcgatcaaagggagcctcagcgtgttactcgatgaccttcaggatctcagtgaagccatttctaaagaagaggcagtttgccaaggcgacaacctagataggtgttcaagcagcaatccacagatgagctcatag

SEQ ID NO: 345427 - DNA, 651 bp, Artificial Sequence
  derived and/or modified sequence
atgtggccccacagcgccggcgcccggccctgggccagcaccctgactggtaaagatcccagggttatggcttgttggtgtctggacggactcccctctggactggctgaaccatggcgcgaactatggcgatggcgctctaggccactgcactgcgtgccacctttcagccctctggcaagatcgagccgtgaccatagaaatttgcgcagaagagtagaggccttgccgaggatactcaagggcaacatcgatggatggcgccagaacctcgaaccttcaaataatgtcgagatgttcccaccgtctggcagcacgggccttatacctccaagccacttccaggccagaccactaagcactctgcccaggatggcccccacatggctgagcgatatccctctggtgcagccccccggacaccaagatgttagcgaaagaaggctggacacccagcgaccacaggtcaccatgtgggagcgggatgttagcagcgaccggcaggagcctggtagacggggccgctcctggggtttggagggttcccaagcgctgagtcagcaggcagaggtaattgttcggcaattacaggagctgagacgactggaggaggaggtgcgacttctgagggaaacttcattacagcaatag

SEQ ID NO: 345428 - DNA, 771 bp, Artificial Sequence
  derived and/or modified sequence
tgaagactggacgccgagcttcagctctctgcgcgtcttatacagcaagaagtgggcagagcccgtgagcaaggcgaagctgaaaggcagcagctgagtaaggtagctcagcaattagagcaggaattacagcagactcaggaatctctcgcctccctggggcttcagcttgaagtcgctcggcagggccaacaggaatcaaccgaggaggccgcttcactgagacaggaactgacacagcagcaagaactgtatggacaggcgctgcaggaaaaggtggctgaggttgaaacccgactcagggaacaactgagcgataccgaaaggagactgaacgaagcccgacgggaacatgccaaagcagttgtaagcctgcgacaaattcaacggagggccgctcaggagaaggagagatctcaggagctgaggcgcctccaagaggaggctcgcaaggaagaggggcagcggctggcacgtagactgcaagagcttgagcgggataagaatcttatgctgcagcgcctcttaacagtcctgccttccttactggataaaaagaagtctgtggtttcctcacccaggccgccagagtgctccgcctctgccccagtcgcggctgcagtcccaacaagggagtccataaagggctcactctctgtcctgcttgatgatcttcaggatcttagcgaagctatcagcaaggaagaagcagtgtgccagggtgacaatttagatcgatgctcatcgtctaacccgcaaatgtcttcttag

SEQ ID NO: 345429 - DNA, 771 bp, Artificial Sequence
  derived and/or modified sequence
tagcggctggatgccgaactccagcttagtgcgagacttatccagcaggaagtgggcagagctcgtgagcaaggggaagcggagagacagcaactctcaaaagtggcccagcagttagaacaggaactccagcagactcaagaatccctcgcttctctggggcttcagctggaggtggcgagacaggggcagcaggaaagcacagaagaagcggcttccctgaggcaagagttaactcagcagcaggaactgtacggccaggctctgcaggagaaggtcgctgaggtggagacaagattaagagagcagctcagtgatacagaacgtcggctgaatgaggcaagacgggagcacgctaaggcggtcgtgtccctccgacagattcagcgcagagctgcacaggagaaagagaggagtcaggagctgcgcagactgcaggaagaagcccgaaaggaagagggtcagcgtctcgcccgtcgtctgcaggagctcgaacgcgataaaaatctcatgctgcaacggctccttaccgttcttcccagtttattggacaaaaaaaagtctgtagtctcaagtcccaggcctcctgagtgttccgctagtgctcccgttgcagcagcagtgccgactcgtgagtcaatcaagggatctctgtcagtgctactagatgaccttcaagacctgtctgaagcgattagtaaggaagaagctgtttgccagggagacaacctcgacagatgttcttcttctaacccccagatgagttcatag

SEQ ID NO: 345430 - DNA, 651 bp, Artificial Sequence
  derived and/or modified sequence
atgtggcctcattctgcaggtgcccgaccctgggcaagcacactcaccgggaaagatccccgtgtcatggcctgttggtgtttagacggcctaccaagcggacttgcggaaccatggcgcgaactgtggcggtggcgatctcgacccctgcactgtgtgcctccgtttagccccctagcacgctcttcccgtgatcataggaacctgcgacgccgagtggaagctctgccacgaattctaaaaggcaacatcgatggctggcggcagaacttggaaccttctaataacgtagagatgttccccccaagcggctccacaggccttataccaccttctcatttccaggctcgacctttgtccaccctcccgcgtatggctccaacttggctctccgatatcccactggttcagcccccagggcaccaggacgtttctgagcgacgccttgacacccagagaccacaagtgaccatgtgggagagagatgtgtcatccgaccgccaggagccaggaaggcggggaagatcctggggactcgaggggtctcaggcgctatcacagcaggccgaagtcatagtgagacaactccaggaactacgcaggctggaggaggaagtccgactgttgcgcgaaactagtttacagcaatag

SEQ ID NO: 345431 - DNA, 771 bp, Artificial Sequence
  derived and/or modified sequence
tagcgcctggatgccgagctgcagctgagtgcccgtctaatccagcaggaggtgggaagggcgagggaacagggagaggcagaacgccaacaactctccaaggtggcgcagcaacttgaacaggagctccagcagacccaggagtccctggccagcctgggtctacagctagaggtggcacgacaggggcagcaagagtctaccgaggaggcggctagcctccgccaggagttgacccagcaacaggagctgtacgggcaggcactgcaagaaaaggtcgccgaagtcgagaccagactgagagagcagctttccgacacagaacgtagactgaacgaggcaagacgagaacatgccaaagctgtggtctcactgcggcagattcaaagaagagctgcccaagagaaagagagatcccaggaattgaggagactgcaggaggaggctaggaaggaggagggccagagattagccagaagactgcaggagctggagcgggacaagaacctcatgctgcagcgcctgctgactgtgcttccttccctcctggataagaagaagtctgtagtcagcagcccgaggcctcctgaatgttccgcctccgcccctgtggctgccgctgtccctacgagggaaagcatcaaggggagtttgtcagtgcttctggacgatctacaggatctttcagaggcaatctctaaggaggaagcagtatgtcagggtgataacctggacagatgctcatcctctaatcctcagatgagcagttag

SEQ ID NO: 345432 - DNA, 2307 bp, Artificial Sequence
  derived and/or modified sequence
atgtttccccctagcggcagcacagggttgatcccaccctcccacttccaggcacgcccactgtctacactcccccgtatggcgccaacctggctgtccgacattcctctggtacaaccaccaggccaccaggatgtctctgagcggagactcgacacacaacgcccacaggtaacaatgtgggagcgtgatgtgtcaagcgacagacaggaaccagggagacgcggaaggtcatggggactcgagggctctcaggcattatcacagcaagcagaagtcatcgtccgtcaactgcaggagctgcgcaggctggaggaagaggtccggctactgagagaaactagtctccaacagaagatgcggctggaagcccaggctatggagctggaagctcttgcaagagccgagaaggcaggtcgggctgaggccgagggtctacgcgctgctctggccggtgcagaggtcgtgaggaaaaatctggaagaaggcagccagagagagctggaggaggtgcagagacttcaccaggagcagctttccagtcttacacaggctcacgaggaagctttgagctcgcttactagtaaagccgaaggtctggaaaagtcgctttcctccctcgaaaccagacgcgcaggcgaggccaaagagcttgctgaggcccaaagagaagccgagttgctgcgcaagcaactgtccaaaactcaagaggacctggaggctcaagtaactttagtcgagaatctgcggaaatatgtgggcgagcaggtgccgtccgaggtccatagccagacctgggaactggagcgccagaaattgcttgaaactatgcagcacctccaggaagaccgagactctctgcatgctaccgctgaactgctgcaggtacgggtacagagtctaacccatatactggcactacaagaggaggagctaaccagaaaagtgcaaccctcagattccctggagcccgagtttactcgcaagtgtcaaagtctgctgaatcgctggagggaaaaggtgttcgccttaatggtacagctgaaggctcaggaacttgaacattccgattctgtcaagcagctgaaaggacaagttgccagccttcaggagaaagtcacctcacagtcacaggaacaggctatcctccagaggtccctgcaggataaagctgctgaggttgaggtagaaaggatgggggcaaaaggcttgcagctggagctctctcgggctcaagaagctcgcaggagatggcaacagcaaaccgcgagcgccgaggaacaactaagactggtggttaatgcagtgtcatcttcacagatctggctggagacaacaatggctaaagtggagggagctgcagcccagttaccaagtctcaacaatcggctttcttacgctgtgcgcaaggtgcatactattcggggactgatagctcggaaacttgcacttgcgcagcttcgccaggaatcctgtccactccctccacccgtgaccgacgtgtctctggagctacagcagctgcgagaggaaagaaatcgcctggatgctgaactgcagttgtcagccaggctcattcagcaggaagtggggagagccagagaacagggtgaggcagaaaggcagcagctgtcaaaggtcgcacagcaacttgagcaggagctccagcaaacacaggagtcgcttgcaagtctggggctgcagctggaggtcgcaaggcagggccagcaagagagcaccgaggaagccgcatcactccgacaggaactcacacagcaacaggaactctacggccaggctctgcaggagaaggtcgcggaagtcgagacccgcctgagagagcagctgtctgacactgaacggagactcaacgaggcgaggcgggagcacgcgaaagccgttgttagcttaaggcagatccagagacgagcagcccaggagaaggagagatcacaggaactccgaaggttgcaggaggaagccagaaaggaggagggccagagattggctcggcgtctccaggagctggaacgtgacaaaaatctgatgctgcagaggctgctcaccgtgctgccatctttgctagataaaaaaaagagtgtggtctcatcaccaagacccccagaatgtagcgcaagcgcaccggtggccgctgcagtgcctacccgagagtccatcaagggcagcctgagtgttcttcttgatgacctgcaggatctatctgaagctatctcaaaagaggaagctgtatgccagggcgacaaccttgaccgttgcagctccagtaatccccaaatgtcttcctag

SEQ ID NO: 345433 - DNA, 651 bp, Artificial Sequence
  derived and/or modified sequence
atgtggcctcattctgctggagcaaggccatgggcttctactctgactggcaaggatcctcgcgtaatggcatgttggtgcctggacggcttaccgtctggcctggcagagccctggagggagctgtggagatggcgttctcgccctttacactgcgttcctccttttagccctcttgccaggtcttctagagaccacagaaatctgcgtcggagagttgaggctctgccacgaattcttaaaggtaatatcgacggctggaggcagaaccttgagcctagcaacaacgtcgaaatgttccctccttcgggtagtaccggtttgataccaccaagtcacttccaggcacgtcccctgtctacgctgcccagaatggcccctacatggctttcagatattcctctcgtacagccacctgggcatcaggacgtttctgagcgaagactcgacacacagagaccccaagtcacaatgtgggagagggacgtgtctagtgacagacaggagcctggtcggcgaggaaggtcatggggactcgaagggagccaagctctgtctcagcaggctgaggtcatagtgaggcagcttcaggagcttaggcgccttgaggaagaagtccgccttctccgggaaacatctctccagcagtag

SEQ ID NO: 345434 - protein, 69 aa, Artificial Sequence
  derived and/or modified sequence
MWVFSNLRCGTPEEPCQEAFNQTNRKLGLTYNTTCCNKDNCNSAGPRPTPALGLVFLTSLAGLGLWLLH

SEQ ID NO: 345435 - protein, 560 aa, Artificial Sequence
  derived and/or modified sequence
MESQPAQECLMQMFLPIEPACFVEWLGTSPSQLGVVMVDEAHERTLHTDILFGLIKDVARFRPELKVLVASATMDTARFSTFFDGAPVFRIPGRRFPVDIFYTKAPEADYLEACVVSVLQIHVTQPPGDILVFLTGQEEIEAACEMLQDRCRRLGSKIRELLVLPIYANLPSDMQARIFQPTPPGARKVVVATNIAETSLTIEGIIYVLDPGFCKQKSYNPRTGMESLTVTPCSKASANQRAGRAGRVAAGKCFRLYTAWAYQHELEETTVPEIQRTSLGNVVLLLKSLGIHDLMHFDFLDPPPYETLLLALEQLYALGALNHLGELTTSGRKMAELPVDPMLSKMILASEKYSCSEEILTVAAMLSVNNSIFYRPKDKVVHADNARVNFFLPGGDHLVLLNVYTQWAESGYSSQWCYENFVQFRSMRRARDVREQLEGLLERVEVGLSSCQGDYIRVRKAITAGYFYHTARLTRSGYRTVKQQQTVFIHPNSSLFEQQPRWLLYHELVLTTKEFMRQVLEIESSWLLEVAPHYYKAKELEDPHAKKMPKKIGKTREELG

SEQ ID NO: 345436 - DNA, 1683 bp, Artificial Sequence
  derived and/or modified sequence
atggaatcgcagcccgcccaggagtgtttgatgcagatgtttttgcccatcgagccagcctgcttcgtcgaatggctggggacctccccaagccagctgggtgtcgtcatggtggacgaagcccacgaacggacactgcatacagacatcctgttcgggctgattaaagacgtcgctcggttcaggccagaattgaaagtgcttgtggccagcgctacaatggacaccgccaggttttctaccttctttgacggcgctccagttttcaggatcccgggccggagatttcctgttgatatattctacactaaggcccccgaggcagactatcttgaagcatgtgtcgttagtgtgctgcagattcacgtcactcagccccctggagatatcctggtgtttctaactggtcaagaggagatcgaagctgcgtgcgaaatgctgcaggacaggtgcagaagactggggtcgaaaattagagaactgctggtgttgcctatctatgctaaccttcccagcgatatgcaggcacgcatcttccagcccaccccaccaggggctaggaaggtcgtggtcgcaactaatatcgccgagacctcccttacaatagaaggtattatctacgtgctcgatccggggttctgcaagcagaaatcctacaaccccagaacgggaatggaaagcctcacagtgaccccctgctccaaggcgagcgctaatcagagagccggacgcgcgggacgtgtggcggccggtaagtgcttccgactttacaccgcatgggcttaccaacatgagttggaggagactaccgtccccgagatacagaggacaagtcttgggaatgtggtgctcctgctgaagtctcttgggatccatgacctgatgcattttgacttcctggatcctccaccatacgaaaccttgctgctggccctcgaacaactgtacgccctcggcgccctgaatcacttgggcgagctgacgaccagcgggagaaagatggccgagctgccagtggaccctatgctgagtaagatgatcctggcctctgagaagtacagctgcagtgaagagatcctgaccgtggcggccatgttatcagttaataattccatcttttacagacctaaggacaaggtggtgcacgctgataatgcgcgggtgaatttctttctgcccggtggtgatcacctcgttttgctgaatgtgtacacccaatgggccgaatctggctacagcagtcagtggtgttacgaaaacttcgtgcagtttcgttcaatgcggagagcgagggatgttcgagaacagctcgaagggttgctcgaaagggtagaggtggggctgagctcctgccaaggcgactacatcagggtgcgaaaggccatcacagccggctatttctatcataccgcccgcttgacccgcagtggttacagaacagtgaagcagcagcagaccgtgttcatccaccctaattcttcactgttcgagcaacagcctcgctggctgctttaccatgaattagtccttacaactaaggaatttatgagacaggttcttgagatcgaaagtagttggctcctggaggtggcaccccattactataaagcaaaagaactggaggatccacacgcgaaaaaaatgccgaagaaaatcggaaaaactagagaggaactcggatag

SEQ ID NO: 345437 - DNA, 1683 bp, Artificial Sequence
  derived and/or modified sequence
atggagagccagcctgcccaggagtgcctgatgcagatgttcctgcccattgaaccagcctgctttgtggagtggctgggcaccagccccagccagctgggcgtggtgatggtggatgaggcccacgagaggaccctgcacacagacatcctgtttggcctcatcaaggatgtggcccgcttccggcctgagctgaaggtgctggtggccagcgccaccatggacacagcccgcttcagcaccttctttgatggagcccctgtgttccgcatccctggccgccgcttccctgtggacatcttctacaccaaggcccctgaggccgactacctggaggcctgtgtggtgtctgtgctgcagatccacgtgacccagcccccaggggacatcctggtgttcctgaccggccaggaggagattgaggccgcctgtgagatgctgcaggaccgctgccggcggctgggcagcaagatccgggagctgctggtgctgcccatctatgccaacctgcccagcgacatgcaggcccgcatcttccagcccaccccacctggggccaggaaggtggtggtggccaccaacattgctgagaccagcctgaccatcgagggcatcatctacgtgctggaccccggcttctgcaagcagaagagctacaaccccaggacaggcatggagagcctgactgtgaccccctgcagcaaggccagcgccaaccagagagctggccgggccggccgggtggccgccggcaagtgcttccggctgtacacagcctgggcctaccagcacgagctggaggagaccaccgtgcctgagatccagaggaccagcctgggcaatgtggtgctgctgctgaagagcctgggcatccatgacctgatgcactttgacttcctggaccccccaccctatgagaccctgctgctggccctggagcagctgtatgccctgggcgccctgaaccacctgggggagctgaccaccagcggcaggaagatggccgagctgcctgtggaccccatgctgagcaagatgatcctggccagcgagaagtacagctgcagcgaggagatcctgactgtggccgccatgctgtctgtgaacaacagcatcttctaccggcccaaggacaaggtggtgcatgctgacaatgcccgggtgaacttcttcctgcctggaggagaccacctggtgctgctgaatgtgtacacccagtgggccgagagcggctacagcagccagtggtgctatgaaaattttgtgcagttccgctccatgaggcgggccagagatgtgcgggagcagctggagggcctgctggagcgggtggaggtgggcctgagcagctgccagggcgactacatccgggtgaggaaggccatcacagctggctacttctaccacacagcccggctgaccaggagcggctacagaacagtgaagcagcagcagaccgtcttcatccaccccaacagcagcctgtttgagcagcagccccgctggctgctgtaccacgagctggtgctgaccaccaaggagttcatgaggcaggtgctggagattgagagctcctggctgctggaggtggccccccactactacaaggccaaggagctggaggacccccacgccaagaagatgcccaagaagattggcaagacccgggaggagctgggctag

SEQ ID NO: 345438 - DNA, 1683 bp, Artificial Sequence
  derived and/or modified sequence
atggagagccagcccgcccaggagtgcctgatgcagatgttcctgccgattgaacccgcctgtttcgtagaatggttgggcactagccctagtcaactcggggtagtcatggtggacgaagcccatgaacgtaccctgcatacagatattttgtttgggctgattaaggatgtggccaggtttcgtcccgagcttaaggttctggtagcctccgcgaccatggatacggcacggttttcgacctttttcgatggggctcctgtcttccgcatccccgggcggcgctttcccgtggatatattctacacgaaggcaccagaagccgactacctggaggcttgtgtagtgtccgtccttcagattcacgtgacacagccaccaggcgatatcctagtgttcttaacggggcaggaggaaattgaggccgcatgtgagatgttgcaggaccgctgtcgccgcctgggttccaaaatccgtgagttactcgtgctgcccatctacgccaacctcccctcggatatgcaggcaaggatttttcaacctacgccacccggtgcccgtaaggttgtcgttgctacgaacatagctgagacaagtctgacaatagaaggaattatttacgtgctggacccagggttttgtaagcagaagtcctataatcccaggactgggatggaaagcctgacagtgacaccttgttccaaagcgagcgcaaatcaaagggctggacgggccggtagagtggccgccggtaaatgcttcagactgtatacagcatgggcctatcagcacgaattggaggagactaccgtgcccgagatccagagaactagcctcggaaatgtcgtattgctgctgaagtccctaggtattcacgacctgatgcactttgactttctggaccctcccccctatgaaacattgctacttgcccttgagcagctatatgctttgggagcactgaatcacttaggggagcttacgacatctggaagaaagatggctgaattaccagtggatcccatgcttagcaaaatgatcctagcttccgagaagtactcctgcagtgaagaaatcctcaccgtagctgccatgctctcggtaaataacagtatcttctacagacccaaggacaaagtggtgcacgccgacaacgcgcgagtcaactttttcctgccaggcggagaccacttagtcctgctgaatgtctacacccagtgggcggagagcggatacagctctcagtggtgttacgagaacttcgtccagttcaggtccatgcgtcgggcaagggacgtacgcgagcaactcgagggtctgctggagagagttgaagtggggctttctagttgccagggtgactatattagagtgcggaaggccatcaccgcaggatacttctatcatacggcccgcctcacaaggtctggatatcgtaccgtgaagcagcagcagactgtttttatccaccctaattcttctctgttcgagcagcagcctcgctggctactttaccacgaactcgtgctgacgacaaaagaatttatgaggcaagtcttggaaattgaaagttcatggctactggaagtcgctccacactactataaggccaaggagctggaggacccacacgcaaaaaaaatgcccaaaaaaattggaaagaccagagaagaactgggctag

SEQ ID NO: 345439 - DNA, 1683 bp, Artificial Sequence
  derived and/or modified sequence
atggagtcacagccggcacaagaatgtctgatgcagatgtttctacccattgagcctgcttgctttgtggagtggttaggtaccagtccgagtcagttgggtgtagtcatggttgacgaagcccatgagaggacccttcataccgacattctctttggacttatcaaagatgtggcgaggtttaggcccgagcttaaagtgctggttgcctcagctactatggacacagctagattcagtactttctttgatggagccccagtgttccgcatccccggtcggaggttccctgtcgatatcttttacaccaaggcccctgaggcagactatctcgaggcctgtgtagtctctgttctccagattcacgtaactcagcctcccggagacattttggtattcttgacaggccaggaagagatagaagctgcctgtgagatgctgcaggatcgttgccgcaggcttggttctaaaatcagggagctgctggtgcttcctatctacgccaacctgccttccgacatgcaggctaggatctttcaacctaccccccctggtgctaggaaggtcgtggtcgctacgaatatcgctgaaacaagtctgacaatcgagggaattatctatgtccttgatccgggtttctgtaaacagaaaagttacaaccctcggactgggatggagagcctcacagtcaccccatgctccaaggcttctgcaaaccagagggcgggtagagccggacgagtcgctgctgggaagtgttttaggctctatacagcatgggcttaccagcatgagcttgaagagacgactgtacccgaaattcagagaaccagtttagggaatgtggtgctgttacttaagtcgctgggcattcacgatctgatgcactttgattttctggatcctccgccttacgagacccttttactcgcgctagagcagttatatgcgcttggagccttgaatcacctcggggagctcaccacttcgggacgcaaaatggccgaacttcccgtcgatccgatgttgtctaagatgattctggcctctgagaagtattcctgttccgaagagattctcactgtggctgctatgttgagcgtgaataatagcatcttttaccgacccaaagataaggtggtgcatgcagacaatgcacgcgtgaacttttttttgccaggcggagatcatctggtactgctcaacgtctacacacagtgggctgagtccggctacagctcacagtggtgttacgaaaattttgtgcagtttcgatcaatgcgcagagcaagggatgtgagggaacagctcgaggggttgcttgagcgggtggaggtgggactgtccagctgccagggtgactacatacgggtgaggaaggccatcacagcaggctacttctaccacaccgcaagattaactcgaagtggctatcggactgtaaaacaacagcagacggtgtttattcaccctaattcctctttgtttgaacagcagcccaggtggcttctctatcacgaactagtcctgactactaaggaatttatgaggcaggtcctggagattgagagctcttggctcttggaagtggctccccactattataaggcgaaggagttggaagatccacacgcgaaaaagatgccaaagaaaataggcaaaacacgggaggagctgggatag

SEQ ID NO: 345440 - DNA, 1683 bp, Artificial Sequence
  derived and/or modified sequence
atggagagccagcccgcccaggagtgcctgatgcagatgttcctgcccatcgagcccgcctgcttcgtggagtggctgggcaccagccccagccagctgggcgtggtgatggtggacgaggcccacgagagaaccctgcacaccgacatcctgttcggcctgatcaaggacgtggccagattcagacccgagctgaaggtgctggtggccagcgccaccatggacaccgccagattcagcaccttcttcgacggcgcccccgtgttcagaatccccggcagaagattccccgtggacatcttctacaccaaggcccccgaggccgactacctggaggcctgcgtggtgagcgtgctgcagatccacgtgacccagccccccggcgacatcctggtgttcctgaccggccaggaggagatcgaggccgcctgcgagatgctgcaggacagatgcagaagactgggcagcaagatcagagagctgctggtgctgcccatctacgccaacctgcccagcgacatgcaggccagaatcttccagcccaccccccccggcgccagaaaggtggtggtggccaccaacatcgccgagaccagcctgaccatcgagggcatcatctacgtgctggaccccggcttctgcaagcagaagagctacaaccccagaaccggcatggagagcctgaccgtgaccccctgcagcaaggccagcgccaaccagagagccggcagagccggcagagtggccgccggcaagtgcttcagactgtacaccgcctgggcctaccagcacgagctggaggagaccaccgtgcccgagatccagagaaccagcctgggcaacgtggtgctgctgctgaagagcctgggcatccacgacctgatgcacttcgacttcctggacccccccccctacgagaccctgctgctggccctggagcagctgtacgccctgggcgccctgaaccacctgggcgagctgaccaccagcggcagaaagatggccgagctgcccgtggaccccatgctgagcaagatgatcctggccagcgagaagtacagctgcagcgaggagatcctgaccgtggccgccatgctgagcgtgaacaacagcatcttctacagacccaaggacaaggtggtgcacgccgacaacgccagagtgaacttcttcctgcccggcggcgaccacctggtgctgctgaacgtgtacacccagtgggccgagagcggctacagcagccagtggtgctacgagaacttcgtgcagttcagaagcatgagaagagccagagacgtgagagagcagctggagggcctgctggagagagtggaggtgggcctgagcagctgccagggcgactacatcagagtgagaaaggccatcaccgccggctacttctaccacaccgccagactgaccagaagcggctacagaaccgtgaagcagcagcagaccgtgttcatccaccccaacagcagcctgttcgagcagcagcccagatggctgctgtaccacgagctggtgctgaccaccaaggagttcatgagacaggtgctggagatcgagagcagctggctgctggaggtggccccccactactacaaggccaaggagctggaggacccccacgccaagaagatgcccaagaagatcggcaagaccagagaggagctgggctag

SEQ ID NO: 345441 - DNA, 1933 bp, Artificial Sequence
  derived and/or modified sequence
ctgaacaatatgtgcctttttgactcttcagaggctgtgaatttctggtcttggaagatcacagtggagcaattggacagataggattttatccttcatatcccttgcaaaagatctctaagaacccatggagagccagccagcgcaagagtgtctgatgcagatgtttttgcccatcgagccagcctgctttgtggaatggctggggacttcaccatcacagttaggcgtggtgatggtggatgaggcacacgaaaggaccctacacacagacattctctttggattgatcaaggatgttgctcgcttccgacctgagctcaaggtcctggtggcttcagccacaatggacactgcccgtttttccaccttctttgatggcgcccctgtgtttcgaatccccggacgcaggtttcctgtggacatcttctacaccaaggctccagaggctgactacttggaagcttgtgtagtatctgtgttgcagatccatgtgacccagccccctggggatatcctggtgttcctgacaggacaggaggagattgaggctgcctgtgagatgctccaggatcgctgccgccgcctgggctccaaaatccgggagctcctggtgctgcccatttatgccaatctgccctctgacatgcaggcccgtatcttccagcccacaccacctggggcacgaaaggtggttgtggcaacgaacattgctgagacatcactcaccattgagggcatcatttatgtgctggatccagggttctgtaagcagaagagctacaacccccgcacaggcatggaatcgctcactgtcacaccctgcagcaaggcctcagccaatcagcgagctggcagggcaggtcgggtggctgcagggaagtgcttccgcctgtataccgcctgggcctatcagcacgagcttgaggaaaccacagtgcctgagatccagaggaccagcttgggcaatgtcgtgttgctgctcaagagcttagggatccatgacctaatgcactttgatttcctggaccctccaccatatgagacactgctgctggctttggagcagctgtatgctctgggagccctcaaccaccttggggagctcaccacgtctggtcgaaagatggcagagctgccggtggaccccatgctgtccaaaatgatcttagcctctgagaagtacagctgttcagaggagatcctgacagtggctgccatgctctctgtcaacaactccatcttctaccgaccaaaggacaaggtcgtccatgctgacaatgcccgtgtcaacttctttctccctggcggtgaccacctggttctgctaaatgtttacacacagtgggctgagagtggttactcttcccagtggtgctatgagaactttgtacagttcagatcgatgcgccgagcccgggatgtgcgggaacagctggaagggctcttggaacgtgtggaagttggtctcagttcctgccagggggactatatccgtgtacgcaaggccatcactgctggttacttttaccacacggcacggttgactcggagtggctaccgcacagtgaaacagcagcagacagtcttcattcatcccaactcctccctctttgagcaacagccacgctggctgctctaccacgaacttgtcttgaccaccaaagagttcatgagacaggtactggagattgagagcagttggcttctggaggtggctccccattattataaggccaaggagctagaagatccccatgctaagaaaatgcccaaaaaaataggcaaaacacgagaagagctagggtaagagaaggacgtaaacagaacctgacaccagctccttttccttctatacattatttaatacctattaaataaaattatttttggaataaagcttgtgggaacatttgggatctagagaaagtga

SEQ ID NO: 345442 - protein, 2089 aa, Artificial Sequence
  derived and/or modified sequence
MEDTQAIDWDVEEEEETEQSSESLRCNVEPVGRLHIFSGAHGPEKDFPLHLGKNVVGRMPDCSVALPFPSISKQHAEIEILAWDKAPILRDCGSLNGTQILRPPKVLSPGVSHRLRDQELILFADLLCQYHRLDVSLPFVSRGPLTVEETPRVQGETQPQRLLLAEDSEEEVDFLSERRMVKKSRTTSSSVIVPESDEEGHSPVLGGLGPPFAFNLNSDTDVEEGQQPATEEASSAARRGATVEAKQSEAEVVTEIQLEKDQPLVKEKDNDTKVKRGAGNGVVPAGVILERSQPPGEDSDTDVDDDSRPPGRPAEVHLERAQPFGFIDSDTDAEEERIPATPVVIPMKKRKIFHGVGTRGPGAPGLAHLQESQAGSDTDVEEGKAPQAVPLEKSQASMVINSDTDDEEEVSAALTLAHLKESQPAIWNRDAEEDMPQRVVLLQRSQTTTERDSDTDVEEEELPVENREAVLKDHTKIRALVRAHSEKDQPPFGDSDDSVEADKSSPGIHLERSQASTTVDINTQVEKEVPPGSAIIHIKKHQVSVEGTNQTDVKAVGGPAKLLVVSLEEAWPLHGDCETDAEEGTSLTASVVADVRKSQLPAEGDAGAEWAAAVLKQERAHEVGAQGGPPVAQVEQDLPISRENLTDLVVDTDTLGESTQPQREGAQVPTGREREQHVGGTKDSEDNYGDSEDLDLQATQCFLENQGLEAVQSMEDEPTQAFMLTPPQELGPSHCSFQTTGTLDEPWEVLATQPFCLRESEDSETQPFDTHLEAYGPCLSPPRAIPGDQHPESPVHTEPMGIQGRGRQTVDKVMGIPKETAERVGPERGPLERETEKLLPERQTDVTGEEELTKGKQDREQKQLLARDTQRQESDKNGESASPERDRESLKVEIETSEEIQEKQVQKQTLPSKAFEREVERPVANRECDPAELEEKVPKVILERDTQRGEPEGGSQDQKGQASSPTPEPGVGAGDLPGPTSAPVPSGSQSGGRGSPVSPRRHQKGLLNCKMPPAEKASRIRAAEKVSRGDQESPDACLPPTVPEAPAPPQKPLNSQSQKHLAPPPLLSPLLPSIKPTVRKTRQDGSQEAPEAPLSSELEPFHPKPKIRTRKSSRMTPFPATSAAPEPHPSTSTAQPVTPKPTSQATRSRTNRSSVKTPEPVVPTAPELQPSTSTDQPVTSEPTSQVTRGRKSRSSVKTPETVVPTALELQPSTSTDRPVTSEPTSQATRGRKNRSSVKTPEPVVPTAPELQPSTSTDQPVTSEPTYQATRGRKNRSSVKTPEPVVPTAPELRPSTSTDRPVTPKPTSRTTRSRTNMSSVKTPETVVPTAPELQISTSTDQPVTPKPTSRTTRSRTNMSSVKNPESTVPIAPELPPSTSTEQPVTPEPTSRATRGRKNRSSGKTPETLVPTAPKLEPSTSTDQPVTPEPTSQATRGRTNRSSVKTPETVVPTAPELQPSTSTDQPVTPEPTSQATRGRTDRSSVKTPETVVPTAPELQASASTDQPVTSEPTSRTTRGRKNRSSVKTPETVVPAAPELQPSTSTDQPVTPEPTSRATRGRTNRSSVKTPESIVPIAPELQPSTSRNQLVTPEPTSRATRCRTNRSSVKTPEPVVPTAPEPHPTTSTDQPVTPKLTSRATRRKTNRSSVKTPKPVEPAASDLEPFTPTDQSVTPEAIAQGGQSKTLRSSTVRAMPVPTTPEFQSPVTTDQPISPEPITQPSCIKRQRAAGNPGSLAAPIDHKPCSAPLEPKSQASRNQRWGAVRAAESLTAIPEPASPQLLETPIHASQIQKVEPAGRSRFTPELQPKASQSRKRSLATMDSPPHQKQPQRGEVSQKTVIIKEEEEDTAEKPGKEEDVVTPKPGKRKRDQAEEEPNRIPSRSLRRTKLNQESTAPKVLFTGVVDARGERAVLALGGSLAGSAAEASHLVTDRIRRTVKFLCALGRGIPILSLDWLHQSRKAGFFLPPDEYVVTDPEQEKNFGFSLQDALSRARERRLLEGYEIYVTPGVQPPPPQMGEIISCCGGTYLPSMPRSYKPQRVVITCPQDFPHCSIPLRVGLPLLSPEFLLTGVLKQEAKPEAFVLSPLEMSST

SEQ ID NO: 345443 - protein, 1802 aa, Artificial Sequence
  derived and/or modified sequence
MEDTQAIDWDVEEEEETEQSSESLRCNVEPVGRLHIFSGAHGPEKDFPLHLGKNVVGRMPDCSVALPFPSISKQHAEIEILAWDKAPILRDCGSLNGTQILRPPKVLSPGVSHRLRDQELILFADLLCQYHRLDVSLPFVSRGPLTVEETPRVQGETQPQRLLLAEDSEEEVDFLSERRMVKKSRTTSSSVIVPESDEEGHSPVLGGLGPPFAFNLNSDTDVEEGQQPATEEASSAARRGATVEAKQSEAEVVTEIQLEKDQPLVKEKDNDTKVKRGAGNGVVPAGVILERSQPPGEDSDTDVDDDSRPPGRPAEVHLERAQPFGFIDSDTDAEEERIPATPVVIPMKKRKIFHGVGTRGPGAPGLAHLQESQAGSDTDVEEGKAPQAVPLEKSQASMVINSDTDDEEEVSAALTLAHLKESQPAIWNRDAEEDMPQRVVLLQRSQTTTERDSDTDVEEEELPVENREAVLKDHTKIRALVRAHSEKDQPPFGDSDDSVEADKSSPGIHLERSQASTTVDINTQVEKEVPPGSAIIHIKKHQVSVEGTNQTDVKAVGGPAKLLVVSLEEAWPLHGDCETDAEEGTSLTASVVADVRKSQLPAEGDAGAEWAAAVLKQERAHEVGAQGGPPVAQVEQDLPISRENLTDLVVDTDTLGESTQPQREGAQVPTGREREQHVGGTKDSEDNYGDSEDLDLQATQCFLENQGLEAVQSMEDEPTQAFMLTPPQELGPSHCSFQTTGTLDEPWEVLATQPFCLRESEDSETQPFDTHLEAYGPCLSPPRAIPGDQHPESPVHTEPMGIQGRGRQTVDKVMGIPKETAERVGPERGPLERETEKLLPERQTDVTGEEELTKGKQDREQKQLLARDTQRQESDKNGESASPERDRESLKVEIETSEEIQEKQVQKQTLPSKAFEREVERPVANRECDPAELEEKVPKVILERDTQRGEPEGGSQDQKGQASSPTPEPGVGAGDLPGPTSAPVPSGSQSGGRGSPVSPRRHQKGLLNCKMPPAEKASRIRAAEKVSRGDQESPDACLPPTVPEAPAPPQKPLNSQSQKHLAPPPLLSPLLPSIKPTVRKTRQDGSQEAPEAPLSSELEPFHPKPKIRTRKSSRMTPFPATSAAPKLEPSTSTDQPVTPEPTSQATRGRTNRSSVKTPETVVPTAPELQPSTSTDQPVTPEPTSQATRGRTDRSSVKTPETVVPTAPELQASASTDQPVTSEPTSRTTRGRKNRSSVKTPETVVPAAPELQPSTSTDQPVTPEPTSRATRGRTNRSSVKTPESIVPIAPELQPSTSRNQLVTPEPTSRATRCRTNRSSVKTPEPVVPTAPEPHPTTSTDQPVTPKLTSRATRRKTNRSSVKTPKPVEPAASDLEPFTPTDQSVTPEAIAQGGQSKTLRSSTVRAMPVPTTPEFQSPVTTDQPISPEPITQPSCIKRQRAAGNPGSLAAPIDHKPCSAPLEPKSQASRNQRWGAVRAAESLTAIPEPASPQLLETPIHASQIQKVEPAGRSRFTPELQPKASQSRKRSLATMDSPPHQKQPQRGEVSQKTVIIKEEEEDTAEKPGKEEDVVTPKPGKRKRDQAEEEPNRIPSRSLRRTKLNQESTAPKVLFTGVVDARGERAVLALGGSLAGSAAEASHLVTDRIRRTVKFLCALGRGIPILSLDWLHQSRKAGFFLPPDEYVVTDPEQEKNFGFSLQDALSRARERRLLEGYEIYVTPGVQPPPPQMGEIISCCGGTYLPSMPRSYKPQRVVITCPQDFPHCSIPLRVGLPLLSPEFLLTGVLKQEAKPEAFVLSPLEMSST

SEQ ID NO: 345444 - DNA, 6270 bp, Artificial Sequence
  derived and/or modified sequence
atggaggacacccaggccatcgactgggacgtggaggaggaggaggagaccgagcagagcagcgagagcctgagatgcaacgtggagcccgtgggcagactgcacatcttcagcggcgcccacggccccgagaaggacttccccctgcacctgggcaagaacgtggtgggcagaatgcccgactgcagcgtggccctgcccttccccagcatcagcaagcagcacgccgagatcgagatcctggcctgggacaaggcccccatcctgagagactgcggcagcctgaacggcacccagatcctgagaccccccaaggtgctgagccccggcgtgagccacagactgagagaccaggagctgatcctgttcgccgacctgctgtgccagtaccacagactggacgtgagcctgcccttcgtgagcagaggccccctgaccgtggaggagacccccagagtgcagggcgagacccagccccagagactgctgctggccgaggacagcgaggaggaggtggacttcctgagcgagagaagaatggtgaagaagagcagaaccaccagcagcagcgtgatcgtgcccgagagcgacgaggagggccacagccccgtgctgggcggcctgggcccccccttcgccttcaacctgaacagcgacaccgacgtggaggagggccagcagcccgccaccgaggaggccagcagcgccgccagaagaggcgccaccgtggaggccaagcagagcgaggccgaggtggtgaccgagatccagctggagaaggaccagcccctggtgaaggagaaggacaacgacaccaaggtgaagagaggcgccggcaacggcgtggtgcccgccggcgtgatcctggagagaagccagccccccggcgaggacagcgacaccgacgtggacgacgacagcagaccccccggcagacccgccgaggtgcacctggagagagcccagcccttcggcttcatcgacagcgacaccgacgccgaggaggagagaatccccgccacccccgtggtgatccccatgaagaagagaaagatcttccacggcgtgggcaccagaggccccggcgcccccggcctggcccacctgcaggagagccaggccggcagcgacaccgacgtggaggagggcaaggccccccaggccgtgcccctggagaagagccaggccagcatggtgatcaacagcgacaccgacgacgaggaggaggtgagcgccgccctgaccctggcccacctgaaggagagccagcccgccatctggaacagagacgccgaggaggacatgccccagagagtggtgctgctgcagagaagccagaccaccaccgagagagacagcgacaccgacgtggaggaggaggagctgcccgtggagaacagagaggccgtgctgaaggaccacaccaagatcagagccctggtgagagcccacagcgagaaggaccagccccccttcggcgacagcgacgacagcgtggaggccgacaagagcagccccggcatccacctggagagaagccaggccagcaccaccgtggacatcaacacccaggtggagaaggaggtgccccccggcagcgccatcatccacatcaagaagcaccaggtgagcgtggagggcaccaaccagaccgacgtgaaggccgtgggcggccccgccaagctgctggtggtgagcctggaggaggcctggcccctgcacggcgactgcgagaccgacgccgaggagggcaccagcctgaccgccagcgtggtggccgacgtgagaaagagccagctgcccgccgagggcgacgccggcgccgagtgggccgccgccgtgctgaagcaggagagagcccacgaggtgggcgcccagggcggcccccccgtggcccaggtggagcaggacctgcccatcagcagagagaacctgaccgacctggtggtggacaccgacaccctgggcgagagcacccagccccagagagagggcgcccaggtgcccaccggcagagagagagagcagcacgtgggcggcaccaaggacagcgaggacaactacggcgacagcgaggacctggacctgcaggccacccagtgcttcctggagaaccagggcctggaggccgtgcagagcatggaggacgagcccacccaggccttcatgctgacccccccccaggagctgggccccagccactgcagcttccagaccaccggcaccctggacgagccctgggaggtgctggccacccagcccttctgcctgagagagagcgaggacagcgagacccagcccttcgacacccacctggaggcctacggcccctgcctgagcccccccagagccatccccggcgaccagcaccccgagagccccgtgcacaccgagcccatgggcatccagggcagaggcagacagaccgtggacaaggtgatgggcatccccaaggagaccgccgagagagtgggccccgagagaggccccctggagagagagaccgagaagctgctgcccgagagacagaccgacgtgaccggcgaggaggagctgaccaagggcaagcaggacagagagcagaagcagctgctggccagagacacccagagacaggagagcgacaagaacggcgagagcgccagccccgagagagacagagagagcctgaaggtggagatcgagaccagcgaggagatccaggagaagcaggtgcagaagcagaccctgcccagcaaggccttcgagagagaggtggagagacccgtggccaacagagagtgcgaccccgccgagctggaggagaaggtgcccaaggtgatcctggagagagacacccagagaggcgagcccgagggcggcagccaggaccagaagggccaggccagcagccccacccccgagcccggcgtgggcgccggcgacctgcccggccccaccagcgcccccgtgcccagcggcagccagagcggcggcagaggcagccccgtgagccccagaagacaccagaagggcctgctgaactgcaagatgccccccgccgagaaggccagcagaatcagagccgccgagaaggtgagcagaggcgaccaggagagccccgacgcctgcctgccccccaccgtgcccgaggcccccgcccccccccagaagcccctgaacagccagagccagaagcacctggcccccccccccctgctgagccccctgctgcccagcatcaagcccaccgtgagaaagaccagacaggacggcagccaggaggcccccgaggcccccctgagcagcgagctggagcccttccaccccaagcccaagatcagaaccagaaagagcagcagaatgacccccttccccgccaccagcgccgcccccgagccccaccccagcaccagcaccgcccagcccgtgacccccaagcccaccagccaggccaccagaagcagaaccaacagaagcagcgtgaagacccccgagcccgtggtgcccaccgcccccgagctgcagcccagcaccagcaccgaccagcccgtgaccagcgagcccaccagccaggtgaccagaggcagaaagagcagaagcagcgtgaagacccccgagaccgtggtgcccaccgccctggagctgcagcccagcaccagcaccgacagacccgtgaccagcgagcccaccagccaggccaccagaggcagaaagaacagaagcagcgtgaagacccccgagcccgtggtgcccaccgcccccgagctgcagcccagcaccagcaccgaccagcccgtgaccagcgagcccacctaccaggccaccagaggcagaaagaacagaagcagcgtgaagacccccgagcccgtggtgcccaccgcccccgagctgagacccagcaccagcaccgacagacccgtgacccccaagcccaccagcagaaccaccagaagcagaaccaacatgagcagcgtgaagacccccgagaccgtggtgcccaccgcccccgagctgcagatcagcaccagcaccgaccagcccgtgacccccaagcccaccagcagaaccaccagaagcagaaccaacatgagcagcgtgaagaaccccgagagcaccgtgcccatcgcccccgagctgccccccagcaccagcaccgagcagcccgtgacccccgagcccaccagcagagccaccagaggcagaaagaacagaagcagcggcaagacccccgagaccctggtgcccaccgcccccaagctggagcccagcaccagcaccgaccagcccgtgacccccgagcccaccagccaggccaccagaggcagaaccaacagaagcagcgtgaagacccccgagaccgtggtgcccaccgcccccgagctgcagcccagcaccagcaccgaccagcccgtgacccccgagcccaccagccaggccaccagaggcagaaccgacagaagcagcgtgaagacccccgagaccgtggtgcccaccgcccccgagctgcaggccagcgccagcaccgaccagcccgtgaccagcgagcccaccagcagaaccaccagaggcagaaagaacagaagcagcgtgaagacccccgagaccgtggtgcccgccgcccccgagctgcagcccagcaccagcaccgaccagcccgtgacccccgagcccaccagcagagccaccagaggcagaaccaacagaagcagcgtgaagacccccgagagcatcgtgcccatcgcccccgagctgcagcccagcaccagcagaaaccagctggtgacccccgagcccaccagcagagccaccagatgcagaaccaacagaagcagcgtgaagacccccgagcccgtggtgcccaccgcccccgagccccaccccaccaccagcaccgaccagcccgtgacccccaagctgaccagcagagccaccagaagaaagaccaacagaagcagcgtgaagacccccaagcccgtggagcccgccgccagcgacctggagcccttcacccccaccgaccagagcgtgacccccgaggccatcgcccagggcggccagagcaagaccctgagaagcagcaccgtgagagccatgcccgtgcccaccacccccgagttccagagccccgtgaccaccgaccagcccatcagccccgagcccatcacccagcccagctgcatcaagagacagagagccgccggcaaccccggcagcctggccgcccccatcgaccacaagccctgcagcgcccccctggagcccaagagccaggccagcagaaaccagagatggggcgccgtgagagccgccgagagcctgaccgccatccccgagcccgccagcccccagctgctggagacccccatccacgccagccagatccagaaggtggagcccgccggcagaagcagattcacccccgagctgcagcccaaggccagccagagcagaaagagaagcctggccaccatggacagccccccccaccagaagcagccccagagaggcgaggtgagccagaagaccgtgatcatcaaggaggaggaggaggacaccgccgagaagcccggcaaggaggaggacgtggtgacccccaagcccggcaagagaaagagagaccaggccgaggaggagcccaacagaatccccagcagaagcctgagaagaaccaagctgaaccaggagagcaccgcccccaaggtgctgttcaccggcgtggtggacgccagaggcgagagagccgtgctggccctgggcggcagcctggccggcagcgccgccgaggccagccacctggtgaccgacagaatcagaagaaccgtgaagttcctgtgcgccctgggcagaggcatccccatcctgagcctggactggctgcaccagagcagaaaggccggcttcttcctgccccccgacgagtacgtggtgaccgaccccgagcaggagaagaacttcggcttcagcctgcaggacgccctgagcagagccagagagagaagactgctggagggctacgagatctacgtgacccccggcgtgcagcccccccccccccagatgggcgagatcatcagctgctgcggcggcacctacctgcccagcatgcccagaagctacaagccccagagagtggtgatcacctgcccccaggacttcccccactgcagcatccccctgagagtgggcctgcccctgctgagccccgagttcctgctgaccggcgtgctgaagcaggaggccaagcccgaggccttcgtgctgagccccctggagatgagcagcacctag

SEQ ID NO: 345445 - DNA, 5409 bp, Artificial Sequence
  derived and/or modified sequence
atggaggacacccaggccatcgactgggacgtggaggaggaggaggagaccgagcagagcagcgagagcctgagatgcaacgtggagcccgtgggcagactgcacatcttcagcggcgcccacggccccgagaaggacttccccctgcacctgggcaagaacgtggtgggcagaatgcccgactgcagcgtggccctgcccttccccagcatcagcaagcagcacgccgagatcgagatcctggcctgggacaaggcccccatcctgagagactgcggcagcctgaacggcacccagatcctgagaccccccaaggtgctgagccccggcgtgagccacagactgagagaccaggagctgatcctgttcgccgacctgctgtgccagtaccacagactggacgtgagcctgcccttcgtgagcagaggccccctgaccgtggaggagacccccagagtgcagggcgagacccagccccagagactgctgctggccgaggacagcgaggaggaggtggacttcctgagcgagagaagaatggtgaagaagagcagaaccaccagcagcagcgtgatcgtgcccgagagcgacgaggagggccacagccccgtgctgggcggcctgggcccccccttcgccttcaacctgaacagcgacaccgacgtggaggagggccagcagcccgccaccgaggaggccagcagcgccgccagaagaggcgccaccgtggaggccaagcagagcgaggccgaggtggtgaccgagatccagctggagaaggaccagcccctggtgaaggagaaggacaacgacaccaaggtgaagagaggcgccggcaacggcgtggtgcccgccggcgtgatcctggagagaagccagccccccggcgaggacagcgacaccgacgtggacgacgacagcagaccccccggcagacccgccgaggtgcacctggagagagcccagcccttcggcttcatcgacagcgacaccgacgccgaggaggagagaatccccgccacccccgtggtgatccccatgaagaagagaaagatcttccacggcgtgggcaccagaggccccggcgcccccggcctggcccacctgcaggagagccaggccggcagcgacaccgacgtggaggagggcaaggccccccaggccgtgcccctggagaagagccaggccagcatggtgatcaacagcgacaccgacgacgaggaggaggtgagcgccgccctgaccctggcccacctgaaggagagccagcccgccatctggaacagagacgccgaggaggacatgccccagagagtggtgctgctgcagagaagccagaccaccaccgagagagacagcgacaccgacgtggaggaggaggagctgcccgtggagaacagagaggccgtgctgaaggaccacaccaagatcagagccctggtgagagcccacagcgagaaggaccagccccccttcggcgacagcgacgacagcgtggaggccgacaagagcagccccggcatccacctggagagaagccaggccagcaccaccgtggacatcaacacccaggtggagaaggaggtgccccccggcagcgccatcatccacatcaagaagcaccaggtgagcgtggagggcaccaaccagaccgacgtgaaggccgtgggcggccccgccaagctgctggtggtgagcctggaggaggcctggcccctgcacggcgactgcgagaccgacgccgaggagggcaccagcctgaccgccagcgtggtggccgacgtgagaaagagccagctgcccgccgagggcgacgccggcgccgagtgggccgccgccgtgctgaagcaggagagagcccacgaggtgggcgcccagggcggcccccccgtggcccaggtggagcaggacctgcccatcagcagagagaacctgaccgacctggtggtggacaccgacaccctgggcgagagcacccagccccagagagagggcgcccaggtgcccaccggcagagagagagagcagcacgtgggcggcaccaaggacagcgaggacaactacggcgacagcgaggacctggacctgcaggccacccagtgcttcctggagaaccagggcctggaggccgtgcagagcatggaggacgagcccacccaggccttcatgctgacccccccccaggagctgggccccagccactgcagcttccagaccaccggcaccctggacgagccctgggaggtgctggccacccagcccttctgcctgagagagagcgaggacagcgagacccagcccttcgacacccacctggaggcctacggcccctgcctgagcccccccagagccatccccggcgaccagcaccccgagagccccgtgcacaccgagcccatgggcatccagggcagaggcagacagaccgtggacaaggtgatgggcatccccaaggagaccgccgagagagtgggccccgagagaggccccctggagagagagaccgagaagctgctgcccgagagacagaccgacgtgaccggcgaggaggagctgaccaagggcaagcaggacagagagcagaagcagctgctggccagagacacccagagacaggagagcgacaagaacggcgagagcgccagccccgagagagacagagagagcctgaaggtggagatcgagaccagcgaggagatccaggagaagcaggtgcagaagcagaccctgcccagcaaggccttcgagagagaggtggagagacccgtggccaacagagagtgcgaccccgccgagctggaggagaaggtgcccaaggtgatcctggagagagacacccagagaggcgagcccgagggcggcagccaggaccagaagggccaggccagcagccccacccccgagcccggcgtgggcgccggcgacctgcccggccccaccagcgcccccgtgcccagcggcagccagagcggcggcagaggcagccccgtgagccccagaagacaccagaagggcctgctgaactgcaagatgccccccgccgagaaggccagcagaatcagagccgccgagaaggtgagcagaggcgaccaggagagccccgacgcctgcctgccccccaccgtgcccgaggcccccgcccccccccagaagcccctgaacagccagagccagaagcacctggcccccccccccctgctgagccccctgctgcccagcatcaagcccaccgtgagaaagaccagacaggacggcagccaggaggcccccgaggcccccctgagcagcgagctggagcccttccaccccaagcccaagatcagaaccagaaagagcagcagaatgacccccttccccgccaccagcgccgcccccaagctggagcccagcaccagcaccgaccagcccgtgacccccgagcccaccagccaggccaccagaggcagaaccaacagaagcagcgtgaagacccccgagaccgtggtgcccaccgcccccgagctgcagcccagcaccagcaccgaccagcccgtgacccccgagcccaccagccaggccaccagaggcagaaccgacagaagcagcgtgaagacccccgagaccgtggtgcccaccgcccccgagctgcaggccagcgccagcaccgaccagcccgtgaccagcgagcccaccagcagaaccaccagaggcagaaagaacagaagcagcgtgaagacccccgagaccgtggtgcccgccgcccccgagctgcagcccagcaccagcaccgaccagcccgtgacccccgagcccaccagcagagccaccagaggcagaaccaacagaagcagcgtgaagacccccgagagcatcgtgcccatcgcccccgagctgcagcccagcaccagcagaaaccagctggtgacccccgagcccaccagcagagccaccagatgcagaaccaacagaagcagcgtgaagacccccgagcccgtggtgcccaccgcccccgagccccaccccaccaccagcaccgaccagcccgtgacccccaagctgaccagcagagccaccagaagaaagaccaacagaagcagcgtgaagacccccaagcccgtggagcccgccgccagcgacctggagcccttcacccccaccgaccagagcgtgacccccgaggccatcgcccagggcggccagagcaagaccctgagaagcagcaccgtgagagccatgcccgtgcccaccacccccgagttccagagccccgtgaccaccgaccagcccatcagccccgagcccatcacccagcccagctgcatcaagagacagagagccgccggcaaccccggcagcctggccgcccccatcgaccacaagccctgcagcgcccccctggagcccaagagccaggccagcagaaaccagagatggggcgccgtgagagccgccgagagcctgaccgccatccccgagcccgccagcccccagctgctggagacccccatccacgccagccagatccagaaggtggagcccgccggcagaagcagattcacccccgagctgcagcccaaggccagccagagcagaaagagaagcctggccaccatggacagccccccccaccagaagcagccccagagaggcgaggtgagccagaagaccgtgatcatcaaggaggaggaggaggacaccgccgagaagcccggcaaggaggaggacgtggtgacccccaagcccggcaagagaaagagagaccaggccgaggaggagcccaacagaatccccagcagaagcctgagaagaaccaagctgaaccaggagagcaccgcccccaaggtgctgttcaccggcgtggtggacgccagaggcgagagagccgtgctggccctgggcggcagcctggccggcagcgccgccgaggccagccacctggtgaccgacagaatcagaagaaccgtgaagttcctgtgcgccctgggcagaggcatccccatcctgagcctggactggctgcaccagagcagaaaggccggcttcttcctgccccccgacgagtacgtggtgaccgaccccgagcaggagaagaacttcggcttcagcctgcaggacgccctgagcagagccagagagagaagactgctggagggctacgagatctacgtgacccccggcgtgcagcccccccccccccagatgggcgagatcatcagctgctgcggcggcacctacctgcccagcatgcccagaagctacaagccccagagagtggtgatcacctgcccccaggacttcccccactgcagcatccccctgagagtgggcctgcccctgctgagccccgagttcctgctgaccggcgtgctgaagcaggaggccaagcccgaggccttcgtgctgagccccctggagatgagcagcacctag

SEQ ID NO: 345446 - DNA, 6270 bp, Artificial Sequence
  derived and/or modified sequence
atggaagacactcaagccattgactgggacgtagaagaagaagaagagactgagcagtcatccgagtccctgaggtgcaacgtggagccggtagggcgcctacacatcttcagcggggctcacggacctgagaaagacttccccctgcacctcgggaagaatgtagtgggccgtatgccagattgctccgtcgcccttccatttcccagcatatcaaaacagcacgccgaaatcgagatcctagcatgggataaagcccctatcttgcgagattgcggtagcttgaacgggacccagatattgcgacccccaaaagtgttaagccctggcgtgagccataggttgcgtgatcaggagctgatcctgtttgccgacctgctttgccagtaccacagactggacgtatccctgccatttgtgtctcgtggaccactgaccgtcgaagagacgccgagagtccagggggaaacccagcctcagcgtctgctcttggcagaggattctgaggaggaggttgactttttatccgaacgaaggatggtgaaaaagagcaggactacttcaagctcagtgatcgtacctgagtctgatgaagagggccatagcccagtactcggcgggttgggcccaccctttgccttcaatctgaatagcgataccgatgtcgaggaggggcaacagccggcaacagaggaagcttcctcagcagccagacgcggagctactgtcgaagcgaaacagtctgaggcggaggtggtgacagagatccagctggagaaggaccaaccccttgtgaaggagaaggataacgacactaaagtcaaaagaggggccggaaatggagtggttccagcaggagtcatcctggagcgctcccaaccacccggcgaggattcagatactgatgtggacgacgacagcaggcctcctgggcggcctgctgaggtccacctcgagagggcacagccattcggtttcattgatagcgataccgatgcagaggaagagagaattcctgcaactcccgtggttatccctatgaagaaacgcaagatctttcatggcgtgggaactcgtggtccaggtgcccccgggctcgcacacttacaagaatcccaggcagggtccgatacggacgttgaggaggggaaagcgcctcaagccgttcctcttgagaaaagccaggcttcaatggtcattaactctgataccgacgacgaagaagaagtttcagccgccctgacactggcgcatctgaaagagtctcagcctgcaatttggaacagggacgcagaagaagatatgccacagagggtcgtcctactgcagagatcccagactacaactgaaagggatagtgatacagatgtggaggaggaagagctgccagtggaaaaccgggaagcagtgctgaaggaccatactaagattcgtgctttggtgagagcacactcagagaaggatcaaccgccattcggcgatagcgatgactcggttgaggccgacaaaagcagccccgggatacacctagaacgaagtcaagcgagtaccacggtggacatcaacactcaggtcgaaaaagaagtccccccaggcagtgccattatccacattaagaaacaccaggtcagcgtagaggggaccaaccaaacagatgttaaagccgttggaggccccgctaaattgcttgtggttagtctcgaggaagcttggcccctgcacggggattgtgaaacagatgcagaggagggaacatccctgaccgccagcgtcgttgcagacgtccggaaaagtcagctgcctgctgagggcgacgcaggtgccgaatgggcagcagctgtattgaagcaagaacgagcccatgaagtgggcgcacagggtggaccacctgtggcccaggtggagcaggacctgcccatttccagagaaaatctaaccgacctcgtggtggatacagacacgctaggagagagtacgcaaccccaacgcgaaggggcacaggtacccaccggacgcgaaagggagcaacacgtggggggaacaaaagacagcgaggataactatggtgacagcgaagacctggacctccaagccacacagtgctttcttgaaaaccaaggactcgaggccgtccaaagtatggaagacgaacccacacaggcatttatgcttacccccccccaggagctgggtccatcccattgtagtttccagactactgggacacttgatgagccatgggaagtgctcgccacccagccgttctgcctcagggagtctgaggattcggaaacacagcccttcgacactcatctcgaagcctatggtccatgcctctctcctcctcgagctatcccaggcgatcagcatcctgagagccccgttcatacagaacctatggggatacaaggtaggggcaggcagaccgtcgataaagtgatgggtatccccaaggagaccgccgagcgcgtggggccagagcgaggcccactagaacgtgagacagaaaagttgcttcccgaacgccagacagacgtgaccggtgaagaggagttgacaaagggcaagcaggatcgggaacaaaagcagctcctagcaagggatacccagcgacaggaatctgataaaaatggtgagagcgcttcccccgaacgcgatagagagagcctcaaagtggaaatagaaacatccgaggagatccaggaaaaacaggtgcaaaaacagacactcccatcgaaagccttcgagcgcgaagttgagcgacctgtggccaatagggagtgtgaccctgccgagctggaggagaaggtcccaaaggtcatcctggagagagacactcagagaggcgagccggagggcggatcacaagaccagaagggccaggcatcttctcccactcctgagcccggtgtcggcgcgggagatctgccaggtcccactagcgccccagttccctccggttctcagagcgggggccgcgggagcccagtttctccccgacggcaccagaagggactgctcaactgcaaaatgccacctgccgagaaggcctcccgaatcagggccgccgagaaggtgtcacgcggggatcaggagtcaccagacgcctgcctacccccaaccgtcccagaggcacccgcccctccgcaaaagccattgaacagtcaatcgcagaagcatcttgctccacctcctctgctcagtccgcttctgccatccattaagccaacggtcaggaagactaggcaggatgggtcccaagaagcccctgaagcccccctctcttctgaacttgaacccttccatcctaagccgaagatcagaacacgcaagagtagcagaatgactccatttcctgctacatctgctgcccccgagcctcacccaagtacgtctacagcacagccggtgacacctaaaccaacttctcaggccacgcgttcaagaaccaataggtcatctgttaaaacgccagaaccagttgtaccaaccgcgcctgagttgcagcctagcaccagtaccgatcagccagtaacgtccgagccaacaagtcaggtcacgcggggcaggaaatcaagatcttcggtgaaaacccctgagacagtcgtgcccaccgccctggagctgcaaccatccaccagtactgatcgtcccgtgactagtgaaccaacctcccaggcgactagaggaagaaagaaccgatcttcggtaaagactcccgaacccgttgtgcccactgcacctgagctgcagcccagtacatctaccgaccaacccgttacctcagaaccgacctatcaagccacaagaggtcggaagaacagatcctcagtcaagacaccggagcctgtggtccccacggcgcccgaacttcggccctctacctcaaccgaccgaccagtcacccccaagcctacatctcgtaccacacgaagtagaacaaacatgtcatctgtgaaaactcccgagacagtcgtgcccactgcaccagagctgcagatcagcactagcacagatcagccagtgacccccaagccgacaagtcggacaacccggtcgcgtacaaatatgtcctccgtgaaaaaccccgagtccacggtgccaatcgcccccgagctgcctccttcgacttccactgagcagcccgtcaccccagagcccacatctcgcgctacccggggcaggaaaaaccgctcctctggaaaaaccccagagaccctggtccccactgctcctaaactggagccttccacctctacggaccaacctgtgaccccagagcccacttcgcaagcaacaaggggcagaacaaaccgctcctctgtcaagacgccagagacggtagttcctactgcacctgaattacaaccaagcacaagcactgaccaacccgtgacgccagagcccacctcacaagccactcgagggaggactgatagatcatctgtgaagacgcctgagaccgtcgtcccaactgctcccgagctgcaggcctcagcctccaccgaccagccggtaacttctgaaccgactagtcggactactcggggaaggaaaaaccgcagcagcgttaagacgccggagacagtggtgccagcagcccctgaattgcagccttctacttccaccgaccagccagtgaccccggaaccaacctccagggccacgcgcgggcggactaacagaagcagtgtcaaaacccccgagtccattgtgcctatcgctccggaactgcagccatccacatcacggaaccagcttgtgaccccagagccgacttcccgagcaacgaggtgccgaactaatcggagtagtgtgaagacccctgagccagtcgtgcccaccgctcctgaacctcaccccactacctctaccgatcagccagtaacaccgaagctgacctctagggccaccaggaggaaaacaaacagaagttccgttaaaactccgaaacctgttgaaccagccgccagtgatctggagccgttcacccctactgatcagagcgtaacgccagaggcaatcgcacagggcgggcaaagcaaaacactgaggtcatccacggtaagggctatgccagtgcccaccaccccagaatttcagtccccagtgactaccgatcaaccgatctctcccgagcccatcactcagccaagttgcattaagcgacagcgagccgctggtaacccgggttccctggccgctcctatagatcataagccctgctccgctcccctggaaccaaagtcacaggcaagccgaaaccagcgctggggggcagtccgggctgcagagagcctaactgcaatcccagaaccggccagcccgcagctgctagagacccccatccatgcctcgcaaattcagaaagttgagcctgccggtaggtcccggttcacaccggagctgcagccgaaggcttcgcagtctagaaaacgctctctagctaccatggatagtcccccacaccagaaacagccacaacggggtgaggtgagccagaaaacagtgattatcaaggaggaagaggaagatacagcagagaagccaggaaaagaagaagatgtggttactcccaagcccgggaaaaggaagcgggatcaagccgaggaggagcctaaccgcattccctcccgatctctgcgacgtacgaagctaaatcaggagagcacagcgccaaaagtcttgtttacaggggtggtggatgccagaggagagagggctgtcctcgctcttggcggatcactggccggcagcgccgccgaggcctctcacctggtaacagatcgaatacgcagaaccgtgaagtttctgtgcgccctcgggcgcggaattccaatcttatcccttgattggctgcaccagtctcggaaggctggattcttcttgccgcctgacgaatatgtggtcaccgaccccgagcaagagaagaacttcggctttagcctccaggatgcactgtccagggctagggagagacgattgctggaaggttacgaaatttacgtcacccccggagtgcagccaccaccccctcagatgggagaaattatcagctgttgcggcggtacgtacctaccaagcatgcccagaagctacaaaccgcagcgcgtcgtgatcacctgtccacaggactttccccactgcagtattcccctcagggtgggattgcccctcctctccccagagtttctgctgactggcgtcctcaaacaagaggccaaaccggaggctttcgtcttgtcccctctcgaaatgtcaagcacctag

SEQ ID NO: 345447 - DNA, 5409 bp, Artificial Sequence
  derived and/or modified sequence
atggaggacactcaagccatcgattgggacgtggaggaagaggaggagacagagcagtcgtccgaatccttgcgctgcaatgtcgaaccagtaggacggttgcatatcttctccggcgcacatggccctgaaaaagattttcctctccatctgggcaagaacgtggttggccggatgccagattgtagcgttgctctgccctttcctagtatctcaaagcagcacgctgagatcgaaatcctggcctgggataaagcgcctatactgagagactgtggatcccttaacggtacgcaaattctgcgtccacccaaggtactaagtccaggcgtctctcatagacttagagaccaggaactaatcttgttcgcagacctgctctgtcagtatcacaggctggatgtttcattacctttcgtgagccgcgggccgctcacagttgaagagacaccacgggttcagggtgagacccaaccacaacgactcctgcttgcggaagactcggaagaagaggttgatttcctgtctgagagaagaatggtgaaaaagtctcggactacttcaagctccgtgatagttcctgaatccgatgaagaggggcattcccccgtactgggcggtttagggcctcctttcgccttcaacctcaactctgataccgacgtggaagaaggccagcagccggcaacagaagaggccagcagcgctgccagaagaggggccacagtggaggccaagcaaagcgaggccgaggtggttaccgagatccaattggaaaaggaccaaccattggtgaaagagaaagataacgacacgaaagtgaagagaggtgccggaaatggcgtcgtgcccgccggcgtgattctggaacgttcccaacctccaggcgaggatagtgacaccgacgttgatgatgactcaagacctccgggaagacccgccgaagtgcatctggaaagggcccaaccgtttggtttcattgattcagacacagatgccgaggaggaacggatccctgctactcccgttgtgattccaatgaaaaaacgtaaaatctttcacggggtggggacccgcggacccggcgctcccggcctcgcccacctccaggaaagtcaggctggctctgacactgacgtggaggaaggaaaggcccctcaggctgtgccgttagaaaagtcccaggcctcaatggtgattaacagcgacaccgacgacgaagaggaagttagcgccgctctcacgctcgcccacctgaaggaaagtcagccagctatctggaatcgggacgccgaggaggatatgccacagcgagtggtgctacttcagagatctcagactactaccgagcgcgactccgataccgatgttgaggaggaagaactgcctgtagaaaatcgtgaagccgttttgaaggatcatacgaagattcgtgcgctcgtgagggcccacagcgagaaggaccagcctccttttggcgactccgacgacagcgtggaagctgacaagtccagtcccggaattcacctggagagatctcaggcatctaccaccgtcgatatcaacacacaagtcgagaaggaagttcctccaggatcagctattatacatatcaagaaacaccaagtgtcagtggagggcacaaaccaaacagacgtaaaagctgtgggtggtccagctaagctgttggtagttagccttgaagaggcgtggccactccatggcgactgcgagactgacgcagaagaaggcactagcctgaccgcatctgttgtcgcggacgtgcggaagagccagctgccagctgagggagacgcaggggccgagtgggccgccgccgttctgaagcaggagagggcccacgaagttggggcccagggaggacccccagtggctcaggtggaacaagatttgcccatatctagggaaaatcttactgacctggtagtcgacaccgacacgctcggagagtcaactcagcctcaacgcgagggtgcacaggtgcctactggtcgtgaacgagagcagcacgtcggggggacgaaggattcagaggataattacggggactcagaagatctcgacctccaggcgacccagtgtttcctggaaaatcagggactggaggccgtgcagtcaatggaggacgagcccactcaagcctttatgctgacacccccacaggaactgggtccctcccactgtagctttcagaccaccggcactctcgatgagccatgggaggtgctggctactcaacctttctgtttgcgcgagtcagaggacagtgaaacccagccattcgacactcacctcgaggcttatggtccttgcttaagcccgccacgcgccatacctggggaccaacacccggaaagcccagtccatactgaacccatggggattcaaggtcgcggcaggcaaactgtggataaggtcatggggatacccaaagagacggccgaacgggtcggacccgaacgggggccattggagcgggaaacagagaagctgctgccagaacggcaaacagatgttaccggggaggaggagctgactaaaggcaagcaggaccgggagcagaagcaattgctggcaagggacacacagcggcaagaatcagacaagaacggcgaatccgccagcccagagagagaccgagaatctctcaaggtcgaaattgagacgagcgaggagatccaagagaaacaggtccaaaaacagacactacccagtaaagcctttgagcgtgaggtagagcggcctgtggccaaccgtgagtgtgacccggctgagctggaagagaaggtcccaaaggtcattctggaaagagacacccagagaggggaacccgagggggggtcacaggatcagaagggccaagcctcctcccccacccctgaaccaggcgtgggggcgggcgatttaccaggcccaacctcggcgcctgtaccttcggggagtcagtcaggcggacgcgggtctcctgttagtccccggcggcaccagaagggccttctgaattgcaagatgcccccagccgaaaaagcctcccgaatccgcgcggcggagaaggtgagccggggcgatcaagagtctcccgatgcgtgtctgcccccgacagtgccggaggcaccagctccaccacaaaagcctctgaacagtcagtcacagaagcacctcgccccgccccccctactgagtcccctgctgccaagcatcaagccaacagtgaggaagacacgtcaggacggctctcaggaggcgcctgaggcccccctgagttcagagttagaaccctttcatcccaagcctaaaatccgtaccagaaaatcttctcggatgaccccttttcccgccacctcagccgcgcctaaactggagccatccacttcaactgaccaacccgtgacgccagaacccacaagtcaggcaacacgcggcaggacaaacaggtcatcagtgaaaacaccagagacggtcgttccaaccgcccctgagctccaaccttcgacttctaccgatcagcccgtgaccccagagcccacttctcaggcaactcgagggcgcaccgatcgctcatctgtgaaaacacccgagacagtggttcccacggcaccggagctgcaggctagcgcatcgaccgaccagccagttaccagcgagcccacttccaggactaccagggggagaaaaaatcgctctagcgtgaaaacacccgaaaccgtggttcctgcagctccagagctccagccgtccacaagtacagatcagcctgtgacccccgaacctacctctcgggctacacgaggaaggacaaatagatcctccgtcaaaactcctgaatctatcgtccctattgcccccgagttacagccaagtacctctaggaaccagctcgtaacacccgagccaacctcacgcgctacgaggtgcagaacaaatcggtctagcgtgaagacccccgagccagtcgtacctacggcaccagaaccacaccccacaacaagcaccgaccagcccgttactcctaagctcacatctcgtgccacgcgtagaaaaacaaaccggtcctccgttaaaacccctaagccagtggaacctgctgcaagtgacctcgagccatttactccaacggatcagtctgtcacgcccgaggctatcgcccaaggcggtcagagcaagacgctgcgttcttcaacggtgagagctatgccagttcccactactccggagttccagagtccggtgactacggaccagcccattagccccgaacccatcacccagccatcttgcatcaagcgccagagggcagcagggaatcccggcagccttgcagcacccattgaccacaagccgtgttccgccccattagaaccgaagtcacaggccagtcgaaatcagcgttggggcgccgtccgggccgccgaatcgcttactgcaattcccgagcctgccagtccccagcttctggaaacccccattcacgcgagccagatacaaaaagtggagccagccggaagatcacgcttcactccggaacttcaaccaaaagccagccagtctcgtaaacggagtctcgcaactatggacagcccgcctcaccaaaagcaacctcagaggggagaagtatcccagaagaccgtcataatcaaggaggaggaggaagacacagctgagaagccaggtaaagaagaagatgtggtaacgccgaaacccggaaagcggaagagagaccaggctgaggaagagcccaacaggatcccaagccgcagcttgagaagaactaaactgaaccaagagtccaccgcacccaaggtgttatttacaggcgttgtggacgcgcggggggaaagagccgttctcgcgttgggagggtcattggctggcagcgccgctgaggcatctcacctggttactgatcggatccggcgtacggtgaaattcctttgcgccctggggagaggcatccccatcctgtccctagactggttgcaccagtcccggaaggctggcttctttttgccgccagacgaatacgtggtcactgaccctgagcaagagaaaaactttggatttagtttgcaggacgctctctcccgcgccagggagagacgactcctggagggatatgagatttacgttaccccaggagtgcagcctcctccccctcaaatgggggaaatcatctcctgctgtgggggcacgtacctcccaagcatgcctcgcagctacaaacctcagagagtcgtgatcacttgccctcaggacttcccccattgcagcatccctctcagagtgggcctgccactcctgtcccctgaattcctgctgacaggagtgttgaagcaggaagccaaaccagaggctttcgtactaagcccgcttgagatgagttccacttag

SEQ ID NO: 345448 - DNA, 6270 bp, Artificial Sequence
  derived and/or modified sequence
atggaggacacccaggccatcgactgggatgtggaggaggaggaggagacagagcagagcagcgagagcctgcgctgcaatgtggagcctgtgggccgcctgcacatcttcagcggggcccacggccctgagaaggacttccccctgcacctgggcaagaatgtggtgggccgcatgccagactgcagcgtggccctgcccttccccagcatcagcaagcagcacgccgagattgagatcctggcctgggacaaggcccccatcctgcgggactgtggcagcctgaatggcacccagatcctgcggccccccaaggtgctgagccctggggtgagccaccggctgcgggaccaggagctgatcctgtttgctgacctgctgtgccagtaccaccggctggatgtgtccctgccctttgtgtcccggggccccctgactgtggaggagaccccccgggtgcagggcgagacccagccccagaggctgctgctggccgaggacagcgaggaggaggtggacttcctgtctgagaggaggatggtgaagaagagcaggaccaccagcagcagcgtcatcgtgcctgagagtgatgaggagggccacagccctgtgctgggcggcctgggccccccatttgccttcaacctgaacagcgacacagatgtggaggagggccagcagcctgccacagaggaggccagcagcgctgcccggcggggggccaccgtggaggccaagcagagcgaggccgaggtggtgacagagatccagctggagaaggaccagcccctggtgaaggagaaggacaatgacaccaaggtgaagagaggagctggaaatggagtggtgcctgctggggtcatcctggagaggagccagcccccaggagaagattctgacacagatgtggatgatgacagcaggcctcctggccggcctgctgaggtgcacctggagcgggcccagcccttcggcttcatcgacagcgacacagatgctgaggaggagcgcatcccagccacccctgtggtgatccccatgaagaagaggaagatcttccacggcgtgggcacccggggccctggggcccctggcctggcccacctgcaggagagccaggccggcagtgacacagatgtggaggagggcaaggccccccaggccgtgcccctggagaagagccaggcctccatggtgatcaacagcgacacagatgatgaggaggaggtgtctgctgccctgaccctggcccacctgaaggagagccagcctgccatctggaacagagatgctgaggaggacatgccccagagggtggtgctgctgcagaggagccagaccaccacagagcgggacagcgacacagatgtggaggaggaggagctgcctgtggagaaccgggaggccgtgctgaaggaccacaccaagatccgggccctggtgcgggcccacagcgagaaggaccagcccccatttggagacagtgatgacagcgtggaggccgacaagagcagccctggcatccacctggagaggagccaggccagcaccaccgtggacatcaacacccaggtggagaaggaggtgcccccaggcagcgccatcatccacatcaagaagcaccaggtgtctgtggagggcaccaaccagacagatgtgaaggctgtgggcggccctgccaagctgctggtggtgtccctggaggaggcctggcccctgcacggggactgtgaaacagatgctgaggagggcaccagcctgacagcctctgtggtggctgatgtgaggaagagccagctgcctgcagaaggagatgctggagctgagtgggccgctgctgtgctgaagcaggagcgggcccacgaggtgggcgcccagggcggcccccctgtggcccaggtggagcaggacctgcccatcagccgggagaacctgacagacctggtggtggacacagacaccctgggggagagcacccagccccagcgggagggcgcccaggtgcccaccggccgggagcgggagcagcacgtgggcggcaccaaggacagcgaggacaactacggggacagcgaggacctggacctgcaggccacccagtgcttcctggagaaccagggcctggaggccgtgcagagcatggaggatgagcccacccaggccttcatgctgaccccaccccaggagctgggccccagccactgcagcttccagaccaccggcaccctggatgagccctgggaggtgctggccacccagcccttctgcctgcgggagagtgaagattctgagacccagccctttgacacccacctggaggcctacggcccctgcctgagccccccccgggccatccctggggaccagcaccctgagagccctgtgcacacagagcccatgggcatccagggccggggccggcagacagtggacaaggtgatgggcatccccaaggagacagctgagcgggtgggccctgagcggggccccctggagcgggagacagagaagctgctgcctgagcggcagacagatgtgactggagaggaggagctgaccaagggcaagcaggaccgggagcagaagcagctgctggcccgggacacccagaggcaggagagtgacaagaatggagagagcgccagccctgagcgggaccgggagagcctgaaggtggagattgagaccagcgaggagatccaggagaagcaggtgcagaagcagaccctgcccagcaaggcctttgagcgggaggtggagaggcctgtggccaacagagaatgtgaccctgctgagctggaggagaaggtgcccaaggtgatcctggagcgggacacccagagaggagagcctgagggcggcagccaggaccagaagggccaggccagcagccccaccccagagcccggggtgggcgctggggacctgcccggccccaccagcgcccctgtgcccagcggcagccagagcggcggccggggcagccctgtgagcccccggcggcaccagaagggcctgctgaactgcaagatgcccccagctgagaaggccagccgcatccgggctgctgagaaggtgtccagaggagaccaggagagcccagatgcctgcctgcccccaacagtgcctgaggccccagccccaccccagaagcccctgaacagccagagccagaagcacctggcccccccacccctgctgagccccctgctgcccagcatcaagcccaccgtgaggaagacccggcaggacggcagccaggaggcccctgaggcccccctgagcagcgagctggagcccttccaccccaagcccaagatccgcaccaggaagagcagcaggatgacccccttccctgccaccagcgctgcccctgagccccaccccagcaccagcacagcccagcctgtgacccccaagcccaccagccaggccaccaggagcaggaccaacagaagctctgtgaagaccccagagcctgtggtgcccacagcccctgagctgcagcccagcaccagcacagaccagcctgtgaccagcgagcccaccagccaggtgacccggggcaggaagagccgcagctctgtgaagaccccagagaccgtggtgcccacagccctggagctgcagcccagcaccagcacagacaggcctgtgaccagcgagcccaccagccaggccacccggggcaggaagaacagaagctctgtgaagaccccagagcctgtggtgcccacagcccctgagctgcagcccagcaccagcacagaccagcctgtgaccagcgagcccacctaccaggccacccggggcaggaagaacagaagctctgtgaagaccccagagcctgtggtgcccacagcccctgagctgcggcccagcaccagcacagacaggcctgtgacccccaagcccaccagcaggaccaccaggagcaggaccaacatgagctctgtgaagaccccagagaccgtggtgcccacagcccctgagctgcagatcagcaccagcacagaccagcctgtgacccccaagcccaccagcaggaccaccaggagcaggaccaacatgagctctgtgaagaaccctgagagcacagtgcccatcgcccctgagctgccccccagcaccagcacagagcagcctgtgaccccagagcccaccagccgggccacccggggcaggaagaacagaagcagcggcaagaccccagagaccctggtgcccacagcccccaagctggagcccagcaccagcacagaccagcctgtgaccccagagcccaccagccaggccacccggggccgcaccaacagaagctctgtgaagaccccagagaccgtggtgcccacagcccctgagctgcagcccagcaccagcacagaccagcctgtgaccccagagcccaccagccaggccacccggggccgcacagacaggagctctgtgaagaccccagagaccgtggtgcccacagcccctgagctgcaggccagcgccagcacagaccagcctgtgaccagcgagcccaccagcaggaccacccggggcaggaagaacagaagctctgtgaagaccccagagaccgtggtgcctgctgcccctgagctgcagcccagcaccagcacagaccagcctgtgaccccagagcccaccagccgggccacccggggccgcaccaacagaagctctgtgaagaccccagagagcatcgtgcccatcgcccctgagctgcagcccagcaccagcaggaaccagctggtgaccccagagcccaccagccgggccacccgctgcaggaccaacagaagctctgtgaagaccccagagcctgtggtgcccacagcccctgagccccaccccaccaccagcacagaccagcctgtgacccccaagctgaccagccgggccaccaggaggaagaccaacagaagctctgtgaagacccccaagcctgtggagcctgctgccagtgacctggagcccttcacccccacagaccagagcgtgaccccagaggccatcgcccagggcggccagagcaagaccctgcggagcagcacagtgcgggccatgcctgtgcccaccaccccagagttccagagccctgtgaccacagaccagcccatcagccctgagcccatcacccagcccagctgcatcaagaggcagagagctgctggcaaccctggcagcctggccgcccccatcgaccacaagccctgcagcgcccccctggagcccaagagccaggccagcaggaaccagcgctggggcgctgtgcgggctgctgagagcctgacagccatccctgagcccgccagcccccagctgctggagacccccatccacgccagccagatccagaaggtggagcccgccggccgcagccgcttcaccccagagctgcagcccaaggccagccagagcaggaagaggagcctggccaccatggacagccccccccaccagaagcagccccagagaggagaggtgtcccagaagacagtcatcatcaaggaggaggaggaggacacagctgagaagccaggcaaggaggaggatgtggtgacccccaagccaggcaagaggaagagggaccaggccgaggaggagcccaaccgcatccccagccgcagcctgcggaggaccaagctgaaccaggagagcacagcccccaaggtgctcttcaccggggtggtggatgcccggggggagagagctgtgctggccctgggcggcagcctggccggcagcgctgctgaggccagccacctggtgacagaccgcatccggaggacagtgaagttcctgtgtgccctgggccggggcatccccatcctgagcctggactggctgcaccagagcaggaaggccggcttcttcctgcccccagatgaatatgtggtgacagatcctgagcaggagaagaactttggcttcagcctgcaggatgccctgagccgggcccgggagcggcggctgctggagggctatgagatctacgtgaccccaggagtgcagcccccaccaccccagatgggagagatcatcagctgctgcggcggcacctacctgcccagcatgcccaggagctacaagccccagagggtggtgatcacctgcccccaggacttcccccactgcagcatccccctgcgggtgggcctgcccctgctgagccctgagttcctgctgactggagtgctgaagcaggaggccaagccagaggcctttgtgctgagccccctggagatgagcagcacctag

SEQ ID NO: 345449 - DNA, 5409 bp, Artificial Sequence
  derived and/or modified sequence
atggaggacacccaggccatcgactgggatgtggaggaggaggaggagacagagcagagcagcgagagcctgcgctgcaatgtggagcctgtgggccgcctgcacatcttcagcggggcccacggccctgagaaggacttccccctgcacctgggcaagaatgtggtgggccgcatgccagactgcagcgtggccctgcccttccccagcatcagcaagcagcacgccgagattgagatcctggcctgggacaaggcccccatcctgcgggactgtggcagcctgaatggcacccagatcctgcggccccccaaggtgctgagccctggggtgagccaccggctgcgggaccaggagctgatcctgtttgctgacctgctgtgccagtaccaccggctggatgtgtccctgccctttgtgtcccggggccccctgactgtggaggagaccccccgggtgcagggcgagacccagccccagaggctgctgctggccgaggacagcgaggaggaggtggacttcctgtctgagaggaggatggtgaagaagagcaggaccaccagcagcagcgtcatcgtgcctgagagtgatgaggagggccacagccctgtgctgggcggcctgggccccccatttgccttcaacctgaacagcgacacagatgtggaggagggccagcagcctgccacagaggaggccagcagcgctgcccggcggggggccaccgtggaggccaagcagagcgaggccgaggtggtgacagagatccagctggagaaggaccagcccctggtgaaggagaaggacaatgacaccaaggtgaagagaggagctggaaatggagtggtgcctgctggggtcatcctggagaggagccagcccccaggagaagattctgacacagatgtggatgatgacagcaggcctcctggccggcctgctgaggtgcacctggagcgggcccagcccttcggcttcatcgacagcgacacagatgctgaggaggagcgcatcccagccacccctgtggtgatccccatgaagaagaggaagatcttccacggcgtgggcacccggggccctggggcccctggcctggcccacctgcaggagagccaggccggcagtgacacagatgtggaggagggcaaggccccccaggccgtgcccctggagaagagccaggcctccatggtgatcaacagcgacacagatgatgaggaggaggtgtctgctgccctgaccctggcccacctgaaggagagccagcctgccatctggaacagagatgctgaggaggacatgccccagagggtggtgctgctgcagaggagccagaccaccacagagcgggacagcgacacagatgtggaggaggaggagctgcctgtggagaaccgggaggccgtgctgaaggaccacaccaagatccgggccctggtgcgggcccacagcgagaaggaccagcccccatttggagacagtgatgacagcgtggaggccgacaagagcagccctggcatccacctggagaggagccaggccagcaccaccgtggacatcaacacccaggtggagaaggaggtgcccccaggcagcgccatcatccacatcaagaagcaccaggtgtctgtggagggcaccaaccagacagatgtgaaggctgtgggcggccctgccaagctgctggtggtgtccctggaggaggcctggcccctgcacggggactgtgaaacagatgctgaggagggcaccagcctgacagcctctgtggtggctgatgtgaggaagagccagctgcctgcagaaggagatgctggagctgagtgggccgctgctgtgctgaagcaggagcgggcccacgaggtgggcgcccagggcggcccccctgtggcccaggtggagcaggacctgcccatcagccgggagaacctgacagacctggtggtggacacagacaccctgggggagagcacccagccccagcgggagggcgcccaggtgcccaccggccgggagcgggagcagcacgtgggcggcaccaaggacagcgaggacaactacggggacagcgaggacctggacctgcaggccacccagtgcttcctggagaaccagggcctggaggccgtgcagagcatggaggatgagcccacccaggccttcatgctgaccccaccccaggagctgggccccagccactgcagcttccagaccaccggcaccctggatgagccctgggaggtgctggccacccagcccttctgcctgcgggagagtgaagattctgagacccagccctttgacacccacctggaggcctacggcccctgcctgagccccccccgggccatccctggggaccagcaccctgagagccctgtgcacacagagcccatgggcatccagggccggggccggcagacagtggacaaggtgatgggcatccccaaggagacagctgagcgggtgggccctgagcggggccccctggagcgggagacagagaagctgctgcctgagcggcagacagatgtgactggagaggaggagctgaccaagggcaagcaggaccgggagcagaagcagctgctggcccgggacacccagaggcaggagagtgacaagaatggagagagcgccagccctgagcgggaccgggagagcctgaaggtggagattgagaccagcgaggagatccaggagaagcaggtgcagaagcagaccctgcccagcaaggcctttgagcgggaggtggagaggcctgtggccaacagagaatgtgaccctgctgagctggaggagaaggtgcccaaggtgatcctggagcgggacacccagagaggagagcctgagggcggcagccaggaccagaagggccaggccagcagccccaccccagagcccggggtgggcgctggggacctgcccggccccaccagcgcccctgtgcccagcggcagccagagcggcggccggggcagccctgtgagcccccggcggcaccagaagggcctgctgaactgcaagatgcccccagctgagaaggccagccgcatccgggctgctgagaaggtgtccagaggagaccaggagagcccagatgcctgcctgcccccaacagtgcctgaggccccagccccaccccagaagcccctgaacagccagagccagaagcacctggcccccccacccctgctgagccccctgctgcccagcatcaagcccaccgtgaggaagacccggcaggacggcagccaggaggcccctgaggcccccctgagcagcgagctggagcccttccaccccaagcccaagatccgcaccaggaagagcagcaggatgacccccttccctgccaccagcgctgcccccaagctggagcccagcaccagcacagaccagcctgtgaccccagagcccaccagccaggccacccggggccgcaccaacagaagctctgtgaagaccccagagaccgtggtgcccacagcccctgagctgcagcccagcaccagcacagaccagcctgtgaccccagagcccaccagccaggccacccggggccgcacagacaggagctctgtgaagaccccagagaccgtggtgcccacagcccctgagctgcaggccagcgccagcacagaccagcctgtgaccagcgagcccaccagcaggaccacccggggcaggaagaacagaagctctgtgaagaccccagagaccgtggtgcctgctgcccctgagctgcagcccagcaccagcacagaccagcctgtgaccccagagcccaccagccgggccacccggggccgcaccaacagaagctctgtgaagaccccagagagcatcgtgcccatcgcccctgagctgcagcccagcaccagcaggaaccagctggtgaccccagagcccaccagccgggccacccgctgcaggaccaacagaagctctgtgaagaccccagagcctgtggtgcccacagcccctgagccccaccccaccaccagcacagaccagcctgtgacccccaagctgaccagccgggccaccaggaggaagaccaacagaagctctgtgaagacccccaagcctgtggagcctgctgccagtgacctggagcccttcacccccacagaccagagcgtgaccccagaggccatcgcccagggcggccagagcaagaccctgcggagcagcacagtgcgggccatgcctgtgcccaccaccccagagttccagagccctgtgaccacagaccagcccatcagccctgagcccatcacccagcccagctgcatcaagaggcagagagctgctggcaaccctggcagcctggccgcccccatcgaccacaagccctgcagcgcccccctggagcccaagagccaggccagcaggaaccagcgctggggcgctgtgcgggctgctgagagcctgacagccatccctgagcccgccagcccccagctgctggagacccccatccacgccagccagatccagaaggtggagcctgctggccgcagccgcttcaccccagagctgcagcccaaggccagccagagcaggaagaggagcctggccaccatggacagccccccccaccagaagcagccccagagaggagaggtgtcccagaagacagtcatcatcaaggaggaggaggaggacacagctgagaagccaggcaaggaggaggatgtggtgacccccaagccaggcaagaggaagagggaccaggccgaggaggagcccaaccgcatccccagccgcagcctgcggaggaccaagctgaaccaggagagcacagcccccaaggtgctcttcaccggggtggtggatgcccggggggagagagctgtgctggccctgggcggcagcctggccggcagcgctgctgaggccagccacctggtgacagaccgcatcagaagaacagtgaagttcctgtgtgccctgggccggggcatccccatcctgagcctggactggctgcaccagagcaggaaggccggcttcttcctgcccccagatgaatatgtggtgacagatcctgagcaggagaagaactttggcttcagcctgcaggatgccctgagccgggcccgggagcggcggctgctggagggctatgagatctacgtgaccccaggagtgcagcccccaccaccccagatgggagagatcatcagctgctgcggcggcacctacctgcccagcatgcccaggagctacaagccccagagggtggtgatcacctgcccccaggacttcccccactgcagcatccccctgcgggtgggcctgcccctgctgagccctgagttcctgctgactggagtgctgaagcaggaggccaagccagaggcctttgtgctgagccccctggagatgagcagcacctag

SEQ ID NO: 345450 - DNA, 6270 bp, Artificial Sequence
  derived and/or modified sequence
atggaggacacccaggccatcgactgggacgtggaggaggaggaggaaacagaacaatcatccgagtcattgcggtgcaatgtggagcccgtggggagactccacatcttttccggagcccatggccctgagaaagattttcccctgcatctcgggaaaaatgtagtcgggagaatgcccgactgctctgtggcacttcctttcccgtcaatctccaaacagcacgcagaaattgaaatcctcgcatgggacaaggcacctattcttcgagattgtggcagtctgaatggcactcagatcttaaggcctccaaaagtcctttcacccggtgtgagccatcgtttaagggaccaggaactgattctgttcgcagatctgttgtgccagtaccatagattagacgtgtccctgccgtttgtgagtcggggcccactgaccgtcgaagagaccccccgggtgcagggggagacccagccccagcgactactactggctgaggatagcgaagaagaagtcgactttctaagtgagaggcgcatggtcaaaaagagcagaacaacctcctcgtccgtgatcgtgcccgaaagcgacgaggagggacactcgcccgtcctgggtggcctgggaccccctttcgcatttaatctgaattccgacactgacgtcgaagaagggcagcaacctgctactgaggaggctagcagcgccgcccgtcgcggagcaacggtcgaggcgaagcagtcggaggcagaagtggtcactgaaatccagctggaaaaagaccagccactggttaaagaaaaagataatgatacaaaagtcaaaaggggtgccggaaacggcgtggtgccagccggagttattctggagaggtcacagccgcctggagaggattcggatactgacgtcgatgacgacagtcgcccacctggacgaccagccgaggtccaccttgagagagcacagccattcggtttcatcgattccgatacagatgcagaagaggagaggatccctgccacccccgttgtgatcccgatgaagaaaaggaagattttccatggggtcggcacacgaggcccaggtgctcccggactggcccatctccaggagtcccaggctggaagtgatacggacgtggaagagggaaaggccccacaagccgtccctttggaaaagtcccaggcatctatggtcatcaacagcgatacagatgacgaagaagaggtgtcagcagcgcttacattagcacatctgaaggaaagccagcccgcaatatggaacagggacgctgaagaagatatgccccagcgcgtggtgctactccagcggagccagactacaacagagcgggattctgacacagatgtggaagaggaagaattgccagtggagaacagagaagcggtgttaaaggaccacaccaaaatcagggctttggtgagggctcactcagaaaaggatcagcctccctttggagacagcgacgatagtgttgaggctgacaagagctcacccggtatccacctggagcgatctcaggcgagcaccacagtggacatcaatacccaggtggagaaggaggtgcccccgggaagcgccataatccatattaaaaagcaccaggtgagtgtcgaggggactaatcagacggacgtgaaggcagtaggggggccagcgaaattgctggttgtttctctggaggaggcttggcccctgcacggtgactgtgagactgacgctgaggaaggcacctcccttaccgccagcgttgttgcagatgtgagaaagtcccagctgccagcagaaggtgatgccggagcagaatgggcggccgccgtgctgaaacaggaaagggcccatgaggtgggcgcccaggggggtccgcctgtcgctcaggtcgaacaggacctgccaatcagtcgagagaacctgactgacctggtggtagacacggatacactcggggaaagtactcagccgcaacgggaaggcgctcaggttccaaccgggcgggaaagagaacagcacgtgggtggcaccaaagactcagaggacaattacggagactccgaggatcttgacttgcaggctacacaatgttttctagagaatcagggcctggaagctgtgcagtcaatggaggacgagcctacacaagcatttatgctgaccccaccacaagaactggggccatcacattgctcttttcagacaaccggcaccctagacgagccatgggaggtgctcgccacacaacccttttgtctcagagagtccgaggatagtgaaacacagccgtttgacacccatctggaagcttacggtccatgcctgtccccgccgcgtgccatccctggagatcagcatcccgagtcccctgtccacaccgagccaatggggattcagggacgcggaagacaaactgttgataaggtgatgggcattccaaaagagactgccgagagagtagggcccgagcgggggccattagagagggagacagaaaagctcctcccagaacgccagaccgacgtgacaggtgaggaggagttgaccaaggggaagcaggacagggagcagaagcagttactggccagagacacacagcggcaggaaagcgataagaacggtgaatccgccagccctgaaagggacagagaatctctaaaggttgaaatcgagacgtccgaggaaattcaagagaagcaggtacaaaaacagactctcccctcaaaagcctttgaacgcgaggttgagaggcctgtagcaaatcgggaatgcgaccccgcggagctggaggaaaaagtcccaaaagtgatcttggaacgagacactcagcgtggggaacctgaaggtggcagtcaggaccagaagggccaagcaagctctccgactcctgagcctggggttggcgcaggtgatcttcccggccccacctctgccccagtgcccagcgggtcacaaagcggcggaaggggtagccccgtgtccccacgtagacaccagaagggcctgttgaattgcaagatgcccccagcagagaaagcctccagaatccgcgcggcggaaaaagtgtcgcggggcgaccaggagtcccctgatgcttgtttgccgcctacagttccggaagcacccgctcccccacagaagccgcttaattcgcagagccagaagcacctggccccccccccactactgtcccctttgcttccgtcaataaaacccacagtgcggaagaccaggcaagatgggagccaggaggccccagaagcaccactcagttcagaactcgaaccctttcaccctaaacctaagattcggacacgaaagtcgtctaggatgaccccttttcctgcgacctccgccgccccagaacctcacccgtctacgagcaccgcccaaccagtcacccccaagccaacatcccaggcgaccaggtcacgcacaaatagatcatctgtgaaaactccggagccagtagtgcccaccgcccctgaactgcagcccagcacgtccactgaccaacccgtcacatccgaacccacttcacaggtgacaagggggagaaaatcccgatccagcgtgaaaacacccgaaactgtggtccccacagctttagagctccaaccttctacatctactgaccggcctgttacatcggaaccaactagccaggccaccaggggcagaaagaataggtcttctgtcaagacccctgaacctgtcgtgcccaccgccccagaattacagccctcgacaagtaccgatcagccagtgacatccgagccaacttaccaggcaacgcggggtaggaagaatagatctagcgtcaagactcctgagcccgttgttcctaccgcgccggaattaaggccctcaacatccaccgatcggcccgttacaccgaagcccacaagtcgtaccactcgatctaggaccaacatgtcatcagttaaaactcccgagacagtggtcccaacagctcccgaactgcaaattagtacgagcacagaccaacctgtgactccaaaaccgacttccaggaccacaaggtcaagaacaaacatgagctccgtgaaaaaccccgagtctacggtacctatcgctcctgaactgccacctagtacaagtactgaacagcccgttactccagaacctacctccagggctacacgcgggcgaaagaatagaagcagcggcaagaccccagagacacttgtgccaaccgcccccaagttggagccttccacttcaaccgatcaacccgtgactcctgagcctacctcacaggctacaagggggcggacaaaccgttcttccgtgaaaacccccgagacagtcgtccctaccgcgcccgaactgcagcccagcactagcacggatcaaccagtcactcctgagccaacatctcaagctacgaggggcaggacggatcggtcatctgtcaagacccctgagacagtcgtcccaaccgcaccggagctgcaagctagtgcaagcacagatcaaccagtcactagtgaaccaacctctcgaacgactagaggccgtaagaatcggtcaagcgtgaagacccccgagaccgtcgtgcccgctgcgcctgagctgcaaccatcaacaagtacagaccagccggtgacacccgagccaacaagtagagcaactcgtggcaggacaaacaggagcagcgtgaaaactccggaaagcatcgtgcccattgcccccgaactccaaccgtcgacgtcaagaaaccagctcgtgactccagaacctactagccgcgcaacacgatgtcggaccaaccgctcttccgtcaagaccccagaaccagtagtgcctacggcacctgagccccaccccaccacctctacggatcagccagttacacctaagctgacatcaagagccacacgaaggaagacaaatcggagtagtgtcaagacgcctaagcccgtggagcctgccgcaagcgacctcgagccttttacaccgacggatcaatctgtgacccccgaggccattgcccagggcgggcagtccaagacactgcgctctagtaccgtcagagctatgccagtgccaacgaccccagagtttcaatctcccgtgactaccgaccaacctatcagcccagaacccatcactcagccgtcttgcattaaacgtcagcgggctgcaggtaatcccggctctctcgctgcaccaatcgatcacaaaccctgttctgcgcctctcgaacctaagtcgcaagcttcaagaaatcaaagatggggggccgtgagggccgccgaaagtcttaccgcaatcccggaacccgcaagcccacagctcctggagactcccattcacgcaagtcagatccagaaggtcgagcccgccggccgtagcagatttacacctgagctgcagcctaaagcatcccaatccagaaaacggagtctggcaacaatggattccccgcctcaccaaaagcaaccccagagaggggaagtgtctcagaagacagtgattatcaaagaggaagaagaggatacagctgaaaagcctggcaaggaggaggacgtggttacccctaagcctgggaaacgcaaacgagatcaagccgaggaggagcctaataggatcccttcccgaagcctacgcagaaccaaactgaaccaggagtctactgcacctaaggttctgttcacgggtgtcgtagatgctaggggtgaaagagcagtactagccctgggtggcagtctggccggatccgctgcagaagctagccacctcgtgaccgatcggatccggcggaccgtgaagttcctgtgtgccttgggccgcggtattcctatcctctcacttgactggcttcaccagtctcgcaaagctggattttttttaccacctgacgagtatgtggtaactgatcccgaacaggagaagaactttggattttcgcttcaggacgccttgagtcgggcaagagaacggcggttgctggaggggtatgaaatctacgtcacgcccggagtacaaccgccaccgcctcagatgggtgaaatcatctcctgctgcgggggtacctacctgccgtctatgccccggagctacaagccccaaagagtggttattacatgcccacaggacttcccacactgctccatccctctgagggtcggactgcccttattgtcacccgaatttctgctcacaggtgtgcttaagcaggaggctaaacccgaggccttcgtgttatcacccctggaaatgagcagcacgtag

SEQ ID NO: 345451 - DNA, 5409 bp, Artificial Sequence
  derived and/or modified sequence
atggaggacacccaggccatcgactgggacgtggaggaggaggaggagacagaacaaagtagtgagagtctacgctgtaacgtggagccagttggacgattacacatcttcagtggggctcacggtcccgaaaaagacttcccactacaccttggcaaaaatgttgtcggaaggatgcccgattgctcagttgcgttgcccttccctagcatcagtaagcagcatgctgaaatcgaaattctggcttgggacaaagcgccaattctgcgggactgtggaagccttaacggcacccaaattcttcgccctcctaaggtcctttcccctggagtttctcatcggttgcgggaccaggagctgatcctgtttgctgatctcctctgccagtatcacagacttgacgtcagcctaccttttgtgtcgcgaggcccattgactgttgaagagaccccaagagttcagggcgagactcagcctcaaaggctcctcctggccgaagatagtgaggaggaagtcgactttctgagtgagagacgcatggtgaaaaaatcccgaaccactagcagttccgtgattgtgcccgagtcagacgaagaggggcactcccctgtcttaggcggtctggggcccccatttgcgtttaatttgaatagcgatacggatgtggaggaggggcagcagcccgcaactgaggaagcctcctctgctgcacgacgcggcgccaccgtggaagcgaaacagagtgaagctgaagtggtcaccgaaatccagttagaaaaggatcaaccacttgtaaaggagaaggataacgacacaaaagttaagcggggagcagggaatggagtagtccctgcaggtgtcatcctcgaacgcagccagcctcctggggaagacagtgacaccgacgtcgacgacgactctaggccacctggacgtccagcggaggtgcatttggaacgcgcacagccatttgggttcatcgattccgatacggacgccgaagaggaacggatcccagccaccccggtggtcattccgatgaagaagcgcaaaatattccatggtgtgggcacccggggacctggcgcaccagggctcgcccacctgcaagaaagtcaagcaggctcagataccgatgttgaggaaggcaaagcacctcaggccgtgcctctggagaagtcccaggcaagcatggtgattaattccgacactgacgatgaggaggaggtgagtgccgcattaactctggcacacctgaaggaaagccagcccgccatctggaatcgcgatgctgaggaagacatgccacaacgcgtggtgctcctgcagagaagtcagacaaccacagaaagggattccgacaccgatgttgaggaagaggaactacctgtagagaatagggaagcagttctgaaggatcataccaagatccgcgcattagtgcgagctcatagcgagaaggaccagccccccttcggcgactccgacgactccgtggaagcagataaaagcagtccaggcatacacctggagaggtcacaagcttccactaccgtggacatcaatacacaagtagagaaggaggtgcctcccggtagtgccatcattcatattaagaaacatcaggtgagcgtggaagggacaaaccagaccgacgtgaaagctgtgggtggccccgccaaactcctagtggtgtccctggaagaagcctggcccttgcacggtgattgcgaaacagatgcagaagaggggacctctctcacggcgtccgtcgttgccgatgttcgcaagtcccagctgcctgccgaaggtgatgctggagccgaatgggccgccgctgtgcttaaacaggagcgcgctcacgaagtgggagcccagggcgggcccccagtggctcaggtcgagcaggacttaccaatttcccgtgagaatctcaccgacctggtggtggacacggatacactgggcgagtctacccagcctcaacgcgaaggcgcacaggttcccaccggtagagaacgagagcaacacgtcggcggaactaaagattcagaggataactacggagattcagaggatttggacctgcaggccacccagtgcttcctggagaatcagggcctggaggcagtgcagtccatggaggatgagccaacccaggcatttatgctaactcctcctcaagagctgggtccctcccactgctcattccaaacaactgggacgcttgacgaaccctgggaagtattggcgacccaacctttctgtctacgtgagagtgaagatagtgaaactcagccatttgacacccacctggaggcttatggaccctgtctctcacctcctcgggcaattccgggggaccaacatccagagtcacctgtgcacactgagcccatgggcattcagggacgtgggagacagacggtcgataaggtgatgggaattcctaaggagaccgccgagcgggtagggccagagcgtggacctctcgaaagagagacggagaaactgcttcccgagcgacagactgacgtcacgggagaagaggaactcacaaaggggaaacaggatcgggagcagaaacagctgctggccagagatacccagaggcaggaatctgataaaaatggagaatccgcttctccggaacgtgatagggaaagtctaaaagtggaaatcgaaacaagtgaggagatacaagagaagcaggtgcaaaagcagacattgccctcaaaagcgttcgaaagggaggttgagaggcccgtggccaatcgggaatgtgatccggcggagcttgaagagaaggtgcccaaagtcatcctggaaagagacacacagcgcggcgagccagagggaggtagccaggaccaaaaagggcaagcctccagccctacacccgagcctggggtcggggccggcgaccttcctggacccacaagcgctccagtccccagcggttcacaatcaggcggtaggggctcgcccgtttctccgagacggcaccagaaagggctgctaaactgcaagatgccccccgctgaaaaagcttctcggattcgcgccgccgaaaaggtcagccgtggtgaccaggagtcacccgatgcttgtcttcctcctacagtaccagaagctccagcccccccacagaagcctctgaattctcagagtcagaaacacttagctccaccacctttgttgagtcccttactaccgtctatcaagcctaccgtgaggaaaacccggcaggatgggagtcaggaggctcccgaggcccccttatcaagtgaattggagccattccatcccaagccaaaaattaggacaagaaaaagctcacggatgacacctttccccgccacctcagccgccccaaagttggagccttctacatctaccgaccaacctgtgaccccagagccaaccagtcaggcgacacggggccggactaatagatcgtctgtgaagacacctgagacagtggtgccaactgcaccagaactccagccatccacttctaccgatcagcctgtgacgcccgagcctactagtcaagccacgagaggtaggaccgatcgatctagtgtcaagacgcctgaaacagtcgtgcccactgctcccgagctgcaagccagcgcctctacagaccagcctgttacttcagagcctaccagtagaacaaccagagggcgcaagaacaggtcctctgttaagactcctgaaactgtggtgccggcagcaccagagcttcagccatcaaccagtaccgatcagccggtaacacccgaaccaacttcgcgcgcaactcgcggccggaccaatcgcagctcggtgaaaacccccgagtcgattgtgcctatcgcaccagaactgcaaccctctacatcgcgtaaccagctcgtgactcctgagccaacttcgcgcgccacccgttgcagaacaaacagaagctccgttaagactcccgaacccgtggttcccaccgcccccgaaccccacccaaccacttccacagatcaacctgtgacccccaagctgacgagtcgagctactcgccgtaaaaccaaccggagttccgtcaaaactcctaagcctgtggaaccggccgcctcagacctcgaaccctttacccctacagatcagtcagtcacaccagaggcaatcgcacagggagggcagagcaagactctgagatcatccactgtcagagcgatgcccgtccccaccacccctgaatttcagtcacccgtgacaacagaccaacctattagtcctgaaccaatcactcagcccagttgcatcaaacggcaaagggccgctgggaatcctggctctctcgcagccccaattgaccacaaaccctgctctgctcccctcgagcctaagagtcaggcctcacgtaatcaacggtggggtgcagtgcgcgcagccgagtccctgaccgctatcccagaaccagcctcacctcaacttctcgaaacacctatccatgcatcccagatacagaaggttgagcctgccggccggtctaggtttactcctgaattacagcctaaggcgagccagtcccggaagcggagcctcgcaaccatggacagccctccccaccagaagcagcctcagcgaggtgaggtctctcagaaaacagtaatcataaaggaagaagaggaggacacagcagagaagcctggcaaagaagaagatgttgtaacccctaaacctggtaagcggaaaagggatcaagccgaggaagaacctaaccggatcccctcaagatcactccggagaaccaaactgaaccaagagagcacagctcccaaggtcctgttcacaggagtcgtggatgctcgtggggagcgagctgtgctggcccttggagggagcctagcagggtcggccgcggaggcctctcatctggttaccgacagaattcggagaactgttaagtttctgtgtgccctgggacggggcattcccattctgtctttggactggctgcatcaatctcggaaagccgggtttttcctgccccccgatgagtacgtggttaccgatcctgaacaggaaaagaactttggcttctctctacaggatgcactgtcccgggcaagggaacgccggctactggagggatacgaaatttatgtgacacccggtgtgcagcccccacccccccagatgggcgaaattatctcctgttgcggaggcacctacctgcctagcatgccacgcagttacaagccccaacgggtagtgattacctgtccccaggatttcccccattgctctattccactccgagtaggactgccgctcctgtctccggaatttctgttaaccggcgtcctgaagcaagaggcaaagccagaagccttcgtcctgtctcccttggaaatgagtagcacctag

SEQ ID NO: 345452 - DNA, 6269 bp, Artificial Sequence
  derived and/or modified sequence
atggaggatactcaggcgattgattgggacgtggaggaggaagaggagacggagcagtcttccgagagcttacgctgcaacgtggagcccgttggaaggctacacatcttctccggtgcccacgggcctgagaaagactttccgctgcatctggggaagaatgtcgtaggcaggatgcccgactgttcagttgcactgccatttccttcaatctctaaacagcatgccgagatcgaaatcctggcttgggacaaggctcccatccttcgcgactgtggttctttaaacggtactcagattctgagaccaccaaaggtgctgagtccaggagtgtctcatcggctgcgtgatcaggagctgatactgttcgctgaccttctttgtcagtatcatcgattggacgtgtccctcccttttgtgtcaagaggtcctctgactgtagaagagactcccagggtccagggcgagacacagccccagcgtcttttgctggccgaggactcggaagaggaggtggacttcctctctgagaggaggatggtaaagaaatcccgcacaacttcttcttccgtcattgtgccagaaagtgacgaagaaggtcattctccagtcctggggggattagggcctcctttcgcgttcaatctcaatagcgatactgatgtcgaggaagggcagcaaccagccaccgaagaggcatctagtgccgctcggaggggtgcaacagtcgaggcaaaacagagcgaggccgaggtggtaaccgaaattcaactggagaaagatcaacctctcgtcaaagagaaagataacgataccaaggtgaagagaggagctggtaacggcgtcgtgccggctggagtcatcctggaacggtctcagccccctggtgaagactcggacacagatgtggatgatgacagccggcctccaggaagaccagccgaagtacacctcgaaagagcccagccgttcggatttattgacagcgacactgacgccgaggaggaacgcattcccgcaaccccggtggtgatcccaatgaaaaaacgcaagatatttcatggagtcggaacccgtggacctggagccccaggtctggctcacctgcaggaaagtcaggccggatctgatacagatgtcgaagaagggaaagccccacaggccgtgcctttagagaagagccaagctagcatggtgattaattccgacactgacgacgaagaagaagtgagcgccgctttgaccctcgcacatttaaaggagtcacagcccgcaatatggaatcgggatgctgaagaagatatgcctcagcgcgtagtcttgttacagaggtcccagacaacaaccgagcgagacagcgataccgacgtggaagaggaggagttacctgttgagaatcgcgaggcagtgttgaaagatcacaccaaaattcgtgcactcgtgagggcacacagcgaaaaagaccagccccctttcggagactctgatgacagcgtagaggctgataaaagcagccctggaatacacctagaacgctcccaggctagcaccactgtcgatatcaatacccaggtggaaaaggaagtaccaccagggtccgcaatcatccatatcaaaaagcatcaggtgagcgttgaaggtaccaaccagactgatgtgaaggccgtcgggggtcctgccaaactgttggttgtatcattggaggaggcctggccactgcacggagattgcgagactgacgccgaggaaggcacatcactcacagcgtctgtggtagcagacgtgaggaagtcccagttaccagccgagggtgatgctggcgctgaatgggcagcagcagtcctcaaacaggagcgagcacatgaggtgggggcacaggggggacccccagttgcacaagtggaacaggatctgcctatatcacgcgaaaaccttacagacctggtggttgataccgacaccctgggcgagagtacccagcctcagcgcgagggcgctcaggtgcccaccggacgtgagcgggaacagcacgtcgggggtaccaaagattccgaagataactatggtgattctgaagacctggatctgcaggcaacacagtgcttccttgaaaaccaagggctggaggctgtccagtcaatggaagacgagcctacccaggcctttatgctcacaccgcctcaggaattaggcccaagccactgttcattccagactacggggaccctcgacgagccctgggaggtgttggctacccagcccttctgcctgcgcgagagtgaagatagcgaaacgcagccctttgacacccatctggaggcctacggcccatgtttgagcccccctagagccattccgggagaccaacatcccgaatcacctgtgcacacagaacctatgggcatccagggtcggggacgtcaaaccgttgacaaagtgatggggatccccaaagagacggcggagcgggttggcccagagaggggacccctcgagcgtgagaccgagaagctgctgcctgagcggcagaccgatgttacgggggaagaagaactgacaaagggcaagcaggatagagaacagaaacaactgctcgctcgcgacacgcagcggcaggaatccgataagaacggcgagtcagcttcacccgaaagagatcgtgagagtttgaaagtggaaatcgagacgagtgaagagatccaagagaaacaagtacagaaacagaccctgccttccaaggcttttgagagagaggtggagcggccagtggccaaccgagaatgtgatcctgctgagcttgaggagaaggtgcctaaagtgattcttgagcgagacacacagagaggggagccagaagggggttctcaagatcagaagggccaggcctcctcaccaacacccgagccaggtgttggcgctggtgatctgcctggccctaccagtgcccctgttccaagtggatcccagtccgggggacgagggtcccccgtcagtcctcgccgacaccaaaagggcctacttaactgcaaaatgcctcctgcagagaaagcatcccggattcgcgcagccgagaaagtgtctcgaggagatcaagagagccccgacgcctgcctgcctcctaccgtgccagaggccccagcccctccacagaaacctctcaacagccagtcccagaagcacctggctccaccaccgctgctttcccccctgcttccgtctatcaaacccaccgtccgaaagacgagacaggatggatcacaggaagctcccgaggcacccctttctagcgaactagaaccctttcacccgaagcccaagatacgcactcgaaagtcctctcggatgacaccattccccgctacctcagcagctcctgagccacatccctccacttccacagcccaacctgttaccccaaagccaaccagccaggctactcggagccgtactaatcgatctagtgttaagaccccagagccagtcgtccctacggcacccgaactccaaccatcaacgtccacggatcagcccgttacttctgaaccaaccagtcaagtgactaggggccgaaaaagtcggtcgtctgtgaagactcctgagacagtcgttccgactgcgcttgagctccagccatcaactagcactgacaggcccgtgacttcagagcctacatctcaggccactagaggaagaaagaatcgctcatctgtgaagacccctgagcccgtcgtgcctacagccccagagctgcaaccttcgacgtcaacagaccagccagttactagcgagccgacctaccaggccacgcgtggcagaaagaaccgttcatctgtaaaaacccccgaacccgtggtgccaaccgcaccagaactgcggccttcaaccagcacagatcggcctgtaacgcccaagcctacgtccagaactacacgcagtcgcactaacatgtcttctgttaaaacgccagagacagtggtgcccactgcccctgagttacagatctcaaccagcacagaccagcctgttacacctaagccaacttctcgaactacaagatcaagaacaaacatgagttctgtgaagaaccccgaatccacggttcctatcgccccagagcttccgccatcaacctcaaccgagcaaccagtcacgccagaacctacgagtcgcgcaacgagaggacggaagaaccgcagtagcggtaaaactcccgagacgctcgtgcctaccgcacctaagctggagccgagcacttcaaccgaccagcccgttacccccgagccgacatcccaggccacccggggtagaactaacaggagctcagtgaagacccctgagaccgttgtacccactgcacccgaactccagccatctacatccaccgatcaacccgtgaccccggaacccaccagccaggcgacgagaggccgaacggatcgcagtagcgttaaaacgcccgaaaccgtcgtgcccacagcaccggagctccaggcctccgcctcaaccgaccaacctgtgaccagcgaacctacgtctaggaccacacgaggccgtaagaacagatccagcgtgaagacgccagaaactgtggtgcccgctgctccagaattacagcctagcacttccaccgatcaaccagttactcctgagcctacgtcccgtgcaacacgtggcagaacgaacaggtctagtgtcaagacgccagagtccatcgtgcccatcgcccctgagctacaaccctccacaagcaggaatcagctggtcactcctgagcctacatcccgagctactaggtgtagaactaatagatcttccgttaagaccccagaaccggtagtgcccacggcccctgagccacaccctaccactagcactgaccagcctgttacccccaagcttacctctagggcaacccgaaggaaaactaataggagcagcgttaagacccccaagcccgtggagcccgcagcttccgatcttgaaccatttactcccacagatcagagcgtgaccccagaggccattgctcaaggtggacaaagtaagaccctcagatcctccacggtgcgggctatgcccgtgcccacgactcccgagttccagagccctgtaaccactgaccaacccatcagtccagagccaattacacagccgagctgcataaaacggcagcgggcagccggaaatccaggaagtttggccgctcccattgatcacaaaccgtgctccgcaccactggaacccaagagccaggcctccagaaatcagcgctggggggcagtgcgcgctgccgagtcacttacggccattccggagccagccagtcctcagctgctggagacaccaatacatgcctctcagattcagaaggtggagccagctggcaggtcaaggttcacccctgagctccagccgaaagccagccagtctaggaaaaggagcctggcaaccatggattccccccctcaccagaagcagcctcagcggggagaggtatcacagaaaacagtgattattaaagaggaagaggaagacacagccgaaaagccgggaaaagaggaggatgtcgtgaccccaaagcccggtaagcggaagcgcgatcaggctgaggaagagcccaacagaataccgagtagaagcctcaggaggaccaaactgaatcaagagagtactgcccctaaggtcctgtttactggagtagtcgatgccagaggcgagagagccgtgctcgcacttggcggatctctggctggaagtgccgcagaggcctcccacctggtcactgaccgaattcggaggactgtgaagttcctttgcgccctgggacgcggaatacctatcctcagcctggattggcttcaccagtcgcgcaaagccggtttcttcctccctccggacgagtacgtggttaccgatccagagcaggagaaaaatttcggatttagcctgcaggacgccctctctcgggctcgagaaaggcgcctcctcgaaggctatgagatctatgtgactcccggtgtgcagccacctccaccccagatgggagaaatcatatcttgttgcggcggtacatacctgccatcgatgccaagaagttataaaccacagcgggtcgtaatcacatgtccccaagactttccgcactgtagtatccctctcagggtaggcctgccacttctgtcaccagagttccttctgactggcgtgttaaagcaggaagctaagccagaggcctttgtcctttcacctctggaaatgagctcgacgta

SEQ ID NO: 345453 - DNA, 5408 bp, Artificial Sequence
  derived and/or modified sequence
atggaggacacgcaggcaatcgattgggacgtggaggaagaggaggaaactgaacagagtagcgaatctctccgctgcaatgtagagccggtcgggaggctgcacatctttagcggagcacatgggccagaaaaggatttcccactgcaccttggaaagaatgtggtggggcgtatgcctgactgttcagtcgctctgccgtttccaagcatctctaagcagcatgcagaaattgaaatcctggcctgggacaaggccccaattctgcgggactgtggctctttgaatggaacccagattttgcgccctcccaaggttcttagccctggagtaagccaccggctacgcgatcaggagctgatattatttgcagatctcctgtgccagtatcacaggctagacgtatctctgcccttcgtgtctagaggaccactgaccgtcgaagagacccccagggttcaaggcgaaacccagcctcaacgactgttgttagccgaggatagcgaagaggaggtggacttcttgtcagagaggagaatggtgaaaaagagtagaacaacctcctcgtctgtaatcgtccccgagtctgatgaagaaggacacagtcccgttcttggtggattgggtcccccattcgctttcaatctgaattctgacacggatgtggaggagggacagcagcccgcaactgaggaggcctctagcgccgctaggagaggcgcaaccgttgaagccaagcagtccgaggccgaggtggtcactgaaattcagctcgaaaaggatcagccactggttaaggagaaagataacgacaccaaagttaaacggggtgctggcaacggggtggtgcctgccggagtaatactcgaacgcagccagcccccaggagaggattcagataccgacgtggacgacgacagccgcccacccggaagacccgctgaagtgcatctggaaagggcccaaccttttggattcatagactcagatactgacgccgaggaggagcgcatacctgctacacccgtggttattcctatgaagaaaagaaagatttttcatggagtaggaacaagaggacccggtgcaccgggactggcacatctccaggagtcacaggcaggaagcgacactgacgtcgaagagggtaaggcccctcaggccgtccctcttgaaaagagccaggcttctatggtgataaattccgataccgatgacgaggaagaagtgtctgccgctctgacactggcgcacctgaaagagtctcagccggcaatctggaatcgagatgccgaagaagacatgccacaaagggttgtgcttcttcaacggtctcagactaccactgagcgtgacagcgatacagacgtggaggaagaggagctccctgtggaaaatcgcgaggccgtgctcaaggaccacaccaagattcgtgccttggtacgtgcccacagcgaaaaggatcaacctccttttggcgactcggatgatagcgtggaagccgataagtcctcccccggaattcacctcgaaagaagccaagccagtacaaccgtcgatattaatacccaggttgagaaagaggtccccccaggaagtgccatcattcacatcaaaaagcaccaggtgtctgtggagggcacaaatcagactgacgtgaaggccgtaggaggccctgccaaactcttggtagtgagtctggaggaggcctggcccctgcatggagattgtgagaccgatgctgaagagggcacaagcttgactgctagtgtcgtggccgacgtgcgcaagtctcagctgcctgctgagggagatgccggtgccgaatgggcggctgccgtgttgaagcaggaacgcgctcatgaggttggagcccaggggggtccgcctgtagcccaggtggagcaggacctccccatctctagggagaatctgaccgacctggttgtcgacacagacaccttgggcgagagcacacagccacagagagagggggctcaggtcccaaccggcagagaaagggaacaacatgttggtggcaccaaagactctgaggataactacggggatagcgaggatttggacttgcaggctactcagtgtttcttagaaaatcagggtttggaagcagtccagtcgatggaagatgagccgacccaggccttcatgctgacaccgccacaggagttggggcctagtcattgtagcttccaaaccacggggacattggacgaaccatgggaggtgctcgcaacgcagccattctgcctccgggaaagcgaggactccgagacacagccattcgatactcacctggaggcctacggaccctgcctgtctccaccccgagccatcccgggagatcaacaccccgagtctcccgtgcataccgagccaatgggtatccagggtcggggaaggcaaacagttgataaggttatggggattcccaaagagacagccgagagggtgggacccgagagaggtcctctggagcgcgagacggagaaattattgccagagagacaaactgatgtgaccggcgaggaggagctgaccaaggggaagcaggatagagaacagaagcaacttctcgcccgagatacccaaagacaggagagtgacaagaacggcgagagtgcgtctccggaacgcgacagggaatccttaaaagtggaaatcgagaccagcgaggagatccaggaaaagcaagttcaaaagcaaactcttccaagcaaagcattcgagcgggaagttgagagacctgtggctaatagagagtgtgaccctgccgagctcgaggagaaagtgcccaaagtgatcctggagagagatacacaaaggggcgagcccgaaggagggtctcaagaccaaaagggtcaagcatcttcacctacacccgagcctggagtgggagcaggggatcttccaggtccgaccagcgcccctgtcccctctggatcccagtctggtgggcgaggctcccccgtgtctcctcgacgacaccagaaaggtctgctgaattgcaaaatgccccctgctgaaaaggcctctagaattcgcgctgcagagaaggtctcgaggggcgatcaggagtctcctgacgcatgcctcccccctaccgtccccgaagctcctgcgcctccacaaaaaccactgaactcccaatcccaaaagcaccttgctcccccaccactgctgtcacccttactgccttcaattaaaccaactgttcgtaaaacacgtcaggatggcagccaagaggctcccgaagccccactgtcatccgagcttgaaccttttcaccccaaacctaagataagaacccggaaatctagcagaatgacacccttcccagccacaagtgcagctccaaagctagagccaagcacctccactgaccagcccgtgacacctgagccaactagccaggccacgcgcggacgaacaaacaggagttctgtgaagactcctgaaaccgttgtgcctactgctccagaactgcagcccagtacttccacagatcagccagtcacccctgaacccacctcgcaggcaacacgaggacggaccgacagatcctcagtcaaaaccccagagaccgtggtccccaccgctcctgagctacaagcctccgctagcaccgaccagccggtgacctctgagccgacgagtcgaactactcggggacgtaagaaccgaagctccgtgaagaccccggagaccgtggttcccgcagccccagagctgcagccaagcacaagcaccgaccagccagtgacacccgaaccgaccagtcgggctacaaggggtcggacaaaccgtagttccgtgaagacaccggaatccatcgtccctatagcaccagaattgcagccaagcacatctcggaaccagctcgtgacccccgagcctacctcacgcgcaacgcgatgccgcaccaatcggtcttccgttaagacccccgagcccgtggtgcctaccgcccctgaacctcaccccacaacctccacagatcaacctgtgacacctaagttaacatcccgggctactaggaggaaaaccaaccgctcatcagtgaagaccccgaagccggtggaaccagccgcatcagatttagaaccctttacacccactgatcagtctgtgacacctgaagccatcgcccaaggtggtcagagtaaaaccctacgcagctcgaccgttcgcgcaatgcccgttccaacaaccccagaattccaatccccagtgaccaccgaccagccaatctcacctgagcccatcacacaacccagctgtatcaaaaggcagcgagcagcgggaaaccccggatctcttgcagcacccattgaccacaaaccatgcagtgctcctttggaaccaaaaagtcaggcctccaggaaccagcggtggggggcagttagagccgcagagtcactcaccgctattcccgagcccgcatctccgcaattactggagaccccgattcacgcatctcagattcagaaagtagaacctgccggacggagcaggttcacaccagagctgcagccaaaagcgtcgcaatctaggaagagaagcctggctacaatggattctcccccacaccagaagcaaccccagagaggcgaggtgtcccagaagacggtgatcatcaaggaagaggaggaggacacagccgagaaacccggaaaggaggaagatgttgtgacacccaagccaggcaaaaggaaacgtgaccaggccgaggaagaacctaacagaatcccctccagaagcctccgacggaccaagttaaaccaggaatccaccgcaccaaaagtactgtttacaggcgtcgtggacgctcgcggtgagagggctgtattggcactgggaggaagcctggctgggtctgcagccgaggccagccacctagtcacggaccggatccggaggacagtaaagtttctgtgcgccctcggacgcggtattcctatcttaagcctggactggcttcaccagtctagaaaggccggtttctttctgccgcctgatgagtacgtagtgacagatcccgaacaagagaaaaacttcggcttctcactccaggatgccctttcgcgggcaagagaaagacggttgttggaaggctatgaaatctatgtaacaccaggtgtccaaccccctcccccacagatgggagagataatttcatgctgtggcggtacatatctgccctctatgccgaggtcgtataaaccccagcgagtcgtgataacatgtcctcaggacttcccgcattgctcaatacctctccgtgtgggtttgcctctgctcagtccagaatttctgctgactggtgttctgaagcaggaggctaagcccgaggccttcgtgctatctccgctggaaatgagtagcacata

SEQ ID NO: 345454 - protein, 193 aa, Artificial Sequence
  derived and/or modified sequence
MTVLEITLAVILTLLGLAILAILLTRWARRKQSEMHISRYSSEQSARLLDYEDGRGSRHAYSTQSDTSCDNRERSKRDYTPSTNSLVSMASKFSLGQTELILLLMCFILALSRSSIGSIKCLQTTEELPSRTAGAMMQFTAPIPGATGPIKLSQKTIVQTPGPIVQYPGPNAGPPSAPRGPPMAPIIISQRTA

SEQ ID NO: 345455 - DNA, 753 bp, Artificial Sequence
  derived and/or modified sequence
ctgctccacgcaatttctcagtgatcctctgcatctctgcctacaagggcctccctgacacccaagttcatattgctcagaaacagtgaacttgagtttttcgttttatcttgatctctctctgacaaagaaatccagatgatgcgagacctgatgaagacaatacatggaaaatgacagtcttggaaataactttggctgtcatcctgactctactgggacttgccatcctggctattttgttaacaagatgggcacgacgtaagcaaagtgaaatgcatatctccagatacagttcagaacaaagtgctagacttctggactatgaggatggtagaggatcccgacatgcatattcaacacaaagtgacacttcatgtgataaccgagagagatccaaaagagattacacaccatcaaccaactctctagtgtctatggcatctaagttctccctgggacaaacagaactcattcttcttttgatgtgttttattttagcactgtctcgatcaagtattggtagtataaaatgtttacaaacaactgaagaacttccttccagaactgcaggagccatgatgcaattcacagcccctattcccggagctacaggacctatcaagctctctcaaaaaaccattgtgcaaactccaggacctattgtacaatatcctggacccaatgctggtccaccttcagcaccccgcggtccacccatggcacccataataatttcacagagaaccgcaa

SEQ ID NO: 345456 - DNA, 753 bp, Artificial Sequence
  derived and/or modified sequence
ctgctccacacaatttctcagtgatcctctgcatctctgcctacaagggcctccctgacacccaagttcatattgctcagaaacagtgaacttgagtttttcgttttaccttgatctctctctgacaaagaaatccagatgatgcgagacctgatgaagacaatacatggaaaatgacagtcttggaaataactttggctgtcatcctgactctactgggacttgccatcctggctattttgttaacaagatgggcacgacgtaagcaaagtgaaatgcatatctccagatacagttcagaacaaagtgctagacttctggactatgaggatggtagaggatcccgacatgcatattcaacacaaagtgacacttcatgtgataaccgagagagatccaaaagagattacacaccatcaaccaactctctagtgtctatggcatctaagttctccctgggacaaacagaactcattcttcttttgatgtgttttattttagcactgtctcgatcaagtattggtagtataaaatgtttacaaacaactgaagaacttccttccagaactgcaggagccatgatgcaattcacagcccctattcccggagctacaggacctatcaagctctctcaaaaaaccattgtgcaaactccaggacctattgtacaatatcctggacccaatgctggtccaccttcagcaccccgcggtccacccatggcacccataataatttcacagagaaccgcaa

SEQ ID NO: 345457 - DNA, 2148 bp, Artificial Sequence
  derived and/or modified sequence
ctgctccacacaatttctcagtgatcctctgcatctctgcctacaagggcctccctgacacccaagttcatattgctcagaaacagtgaacttgagtttttcgttttatcttgatctctctctgacaaagaaatccagatgatgcgagacctgatgaagacaatacatggaaaatgacagtcttggaaataactttggctgtcatcctgactctactgggacttgccatcctggctattttgttaacaagatgggcacgacgtaagcaaagtgaaatgcatatctccagatacagttcagaacaaagtgctagacttctggactatgaggatggtagaggatcccgacatgcatattcaacacaaagtgacacttcatgtgataaccgagagagatccaaaagagattacacaccatcaaccaactctctagtgtctatggcatctaagttctccctgggacaaacagaactcattcttcttttgatgtgttttattttagcactgtctcgatcaagtattggtagtataaaatgtttacaaacaactgaagaacttccttccagaactgcaggagccatgatgcaattcacagcccctattcccggagctacaggacctatcaagctctctcaaaaaaccattgtgcaaactccaggacctattgtacaatatcctggacccaatgctggtccaccttcagcaccccgcggtccacccatggcacccataataatttcacagagaaccgcaagaatacctcaagttcacactatggacagttctggaaaaatcacactgactcctgtggttatattaacaggttacatggatgaagaacttgcaaaaaaaccttgttccaaaatccagattctaaaatgtggaggcactgcaaggtctcagaatagccgagaagaaaacaaggaagcactaaagaatgacatcatatttacgaattctgtagaatccttgaaatcagcacacataaaggagccagaaagagaaggaaaaggcactgatttagagaaagacaaaataggaatggaggtcaaggtagacagtgacgctggaataccaaaaagacaggaaacccaactaaaaatcagtgagatgagtataccacaaggacagggagcccaaataaagaaaagtgtgtcagatgtaccaagaggacaggagtcccaagtaaagaagagtgagtcaggtgtcccaaaaggacaagaagcccaagtaacgaagagtgggttggttgtactgaaaggacaggaagcccaggtagagaagagtgagatgggtgtgccaagaagacaggaatcccaagtaaagaagagtcagtctggtgtctcaaagggacaggaagcccaggtaaagaagagggagtcagttgtactgaaaggacaggaagcccaggtagagaagagtgagttgaaggtaccaaaaggacaagaaggccaagtagagaagactgaggcagatgtgccaaaggaacaagaggtccaagaaaagaagagtgaggcaggtgtactgaaaggaccagaatcccaagtaaagaacactgaggtgagtgtaccagaaacactggaatcccaagtaaagaagagtgagtcaggtgtactaaaaggacaggaagcccaagaaaagaaggagagttttgaggataaaggaaataatgataaagaaaaggagagagatgcagagaaagatccaaataaaaaagaaaaaggtgacaaaaacacaaaaggtgacaaaggaaaggacaaagttaaaggaaagagagaatcagaaatcaatggtgaaaaatcaaaaggctcgaaaagggcgaaggcaaatacaggaaggaagtacaacaaaaaagtggaagagtaaggataaattttttaaaggcccataagacaagtgattattatgattcccatactccagatacaaaccatatcccagccattgcctaaacagattacaattataaaatccctttcatcttcatatcacagtttctgctcttcagaagtttcaccctttttaatctctcagccacaaacctcagtttccaaatatttgtttcataagttaagacgtatatgattccgtcaagaaagactggatactttctgaagtaaaacattttaattaaagaaatatatagtaa

SEQ ID NO: 345458 - DNA, 582 bp, Artificial Sequence
  derived and/or modified sequence
atgaccgtgctggagatcaccctggccgtgatcctgaccctgctgggcctggccatcctggccatcctgctgaccagatgggccagaagaaagcagagcgagatgcacatcagcagatacagcagcgagcagagcgccagactgctggactacgaggacggcagaggcagcagacacgcctacagcacccagagcgacaccagctgcgacaacagagagagaagcaagagagactacacccccagcaccaacagcctggtgagcatggccagcaagttcagcctgggccagaccgagctgatcctgctgctgatgtgcttcatcctggccctgagcagaagcagcatcggcagcatcaagtgcctgcagaccaccgaggagctgcccagcagaaccgccggcgccatgatgcagttcaccgcccccatccccggcgccaccggccccatcaagctgagccagaagaccatcgtgcagacccccggccccatcgtgcagtaccccggccccaacgccggcccccccagcgcccccagaggcccccccatggcccccatcatcatcagccagagaaccgcctag

SEQ ID NO: 345459 - DNA, 1692 bp, Artificial Sequence
  derived and/or modified sequence
atgaccgtgctggagatcaccctggccgtgatcctgaccctgctgggcctggccatcctggccatcctgctgaccagatgggccagaagaaagcagagcgagatgcacatcagcagatacagcagcgagcagagcgccagactgctggactacgaggacggcagaggcagcagacacgcctacagcacccagagcgacaccagctgcgacaacagagagagaagcaagagagactacacccccagcaccaacagcctggtgagcatggccagcaagttcagcctgggccagaccgagctgatcctgctgctgatgtgcttcatcctggccctgagcagaagcagcatcggcagcatcaagtgcctgcagaccaccgaggagctgcccagcagaaccgccggcgccatgatgcagttcaccgcccccatccccggcgccaccggccccatcaagctgagccagaagaccatcgtgcagacccccggccccatcgtgcagtaccccggccccaacgccggcccccccagcgcccccagaggcccccccatggcccccatcatcatcagccagagaaccgccagaatcccccaggtgcacaccatggacagcagcggcaagatcaccctgacccccgtggtgatcctgaccggctacatggacgaggagctggccaagaagccctgcagcaagatccagatcctgaagtgcggcggcaccgccagaagccagaacagcagagaggagaacaaggaggccctgaagaacgacatcatcttcaccaacagcgtggagagcctgaagagcgcccacatcaaggagcccgagagagagggcaagggcaccgacctggagaaggacaagatcggcatggaggtgaaggtggacagcgacgccggcatccccaagagacaggagacccagctgaagatcagcgagatgagcatcccccagggccagggcgcccagatcaagaagagcgtgagcgacgtgcccagaggccaggagagccaggtgaagaagagcgagagcggcgtgcccaagggccaggaggcccaggtgaccaagagcggcctggtggtgctgaagggccaggaggcccaggtggagaagagcgagatgggcgtgcccagaagacaggagagccaggtgaagaagagccagagcggcgtgagcaagggccaggaggcccaggtgaagaagagagagagcgtggtgctgaagggccaggaggcccaggtggagaagagcgagctgaaggtgcccaagggccaggagggccaggtggagaagaccgaggccgacgtgcccaaggagcaggaggtgcaggagaagaagagcgaggccggcgtgctgaagggccccgagagccaggtgaagaacaccgaggtgagcgtgcccgagaccctggagagccaggtgaagaagagcgagagcggcgtgctgaagggccaggaggcccaggagaagaaggagagcttcgaggacaagggcaacaacgacaaggagaaggagagagacgccgagaaggaccccaacaagaaggagaagggcgacaagaacaccaagggcgacaagggcaaggacaaggtgaagggcaagagagagagcgagatcaacggcgagaagagcaagggcagcaagagagccaaggccaacaccggcagaaagtacaacaagaaggtggaggagtag

SEQ ID NO: 345460 - DNA, 582 bp, Artificial Sequence
  derived and/or modified sequence
atgaccgtgctggagatcaccctcgctgtgattctgaccttactgggcctggcaatcctagcaatactgctgacacgttgggctagaagaaagcaatccgagatgcacataagccggtatagtagcgagcaaagtgcgcggctattggattacgaagatgggagaggtagtcggcatgcatacagtactcaaagcgacacgtcttgcgataacagggagagaagcaaacgtgattacaccccctccactaactctctggttagtatggccagcaagttctccttaggtcagactgagctgatattgttattgatgtgctttatacttgccctgagccggtcgagcatagggtcgatcaaatgtctgcagaccacagaggaactcccaagcaggacagctggagctatgatgcagtttacggcccctattccgggcgccactggaccaatcaagttgtcccaaaagaccattgtgcagacaccaggccccatcgtccaatatccaggtccaaacgccggacccccctcagcaccacggggcccccctatggcaccaatcattattagccaaagaacagcctag

SEQ ID NO: 345461 - DNA, 582 bp, Artificial Sequence
  derived and/or modified sequence
atgaccgtgttggagataaccctcgcggtgatactaaccctcctgggtctggccatcctggcaatcctactgactcggtgggcccgacgcaagcaaagtgaaatgcacatttcaagatactcttcggagcagtccgcacggttactggattatgaagacggcagaggcagtcggcatgcttactccacccagagtgatactagctgtgataatagggagcgaagtaagagagactatacccccagtactaactccctagtcagcatggcatctaagttttctcttggacagaccgaacttattttgctgttgatgtgcttcatccttgccctgagccgttcttctataggtagcattaaatgtttgcaaaccactgaggagctccctagtcgtactgccggggcgatgatgcagttcactgcgccaattccaggtgcgactggcccaatcaagctctctcagaagactatagttcagacacctggccccatagtgcagtatcctggccccaatgcaggacccccctcagcaccccggggccctccaatggcccctatcataatctcccagcggacggcatag

SEQ ID NO: 345462 - DNA, 1692 bp, Artificial Sequence
  derived and/or modified sequence
atgaccgtgttggagatcacccttgctgtgatcctgaccctgcttggcttagcaatcctagcaattctccttaccaggtgggcccgcaggaagcaatcagagatgcacatttcgcgctacagctcggaacagtctgccagactgcttgattatgaagacggcaggggctcgaggcatgcctattcaactcaaagtgataccagctgcgacaatagggaaaggtccaaaagggactacaccccttcaacaaactcgctggtgtcaatggcaagtaagtttagcctgggtcagactgagctcattctgcttctcatgtgcttcattctggctttgagccgatcctccatcggaagcataaaatgcctgcagacaacagaagagctgccaagtcgcaccgccggggctatgatgcagtttaccgctcctatcccaggggcgacaggaccaatcaagctttcccagaaaaccattgtccagactcctggcccaattgtccagtatcctgggccaaatgctgggccacccagcgctcccagaggccctcctatggcccctataatcatttctcagcgtacggcgagaataccccaggttcacacaatggatagttcaggtaaaattacactgactccagtggtgatcctgacaggctatatggatgaagaactggccaagaaaccatgtagtaaaatacagattctaaaatgtggaggaacagccaggagccaaaactcccgtgaggagaataaggaagcactgaagaatgacattatatttaccaacagcgtggagagtttaaagagcgcgcacatcaaagaacccgaacgcgaggggaaaggaacagacctggagaaggataaaatcggcatggaagtgaaagtcgattctgacgccggtatccctaaacggcaagagactcagctgaagataagcgagatgagtattcctcaggggcagggggcacagatcaagaaatcagttagtgatgtcccaagaggtcaggaaagtcaggtgaaaaaaagtgaaagcggcgtacccaagggccaggaggcccaggtcacaaaatccggtctggttgtactgaaggggcaggaggcccaggttgaaaaaagcgaaatgggtgtcccccgacgccaggaatcgcaagtcaagaaatcccagagcggagtgtcgaaggggcaagaggcccaagttaaaaagcgagagtctgtggtgctgaagggccaggaagcgcaggtagagaaatctgagcttaaggtgccaaagggacaagaaggacaggtggaaaagactgaggccgacgtgccaaaagaacaggaggtgcaggagaagaaatccgaggcaggcgttctcaaaggtccggagagccaggtgaaaaatactgaggtgtctgtaccagagactctcgaatcccaagtgaagaagtccgaaagcggcgtcctcaagggccaggaggcccaggaaaagaaggagagcttcgaagacaaaggaaataacgataaagaaaaggagcgggacgccgaaaaggaccctaataaaaaagagaaaggggataaaaacacgaagggagacaagggaaaggataaggttaaagggaagcgggaaagcgagataaatggggaaaaatctaagggctctaagcgagcaaaagccaacacaggccggaaatacaataagaaggtggaggaatag

SEQ ID NO: 345463 - DNA, 582 bp, Artificial Sequence
  derived and/or modified sequence
atgacagtgctggagatcaccctggccgtcatcctgaccctgctgggcctggccatcctggccatcctgctgacccgctgggcccggaggaagcagagcgagatgcacatcagccgctacagcagcgagcagagcgcccggctgctggactatgaagatggccggggcagcagacatgcctacagcacccagagcgacaccagctgtgacaaccgggagaggagcaagagggactacacccccagcaccaacagcctggtgtccatggccagcaagttcagcctgggccagacagagctgatcctgctgctgatgtgcttcatcctggccctgagccgcagcagcatcggcagcatcaagtgcctgcagaccacagaggagctgcccagcaggacagctggggccatgatgcagttcaccgcccccatccctggggccaccggccccatcaagctgagccagaagaccatcgtgcagaccccaggccccatcgtgcagtacccaggccccaatgccggcccccccagcgccccccggggcccccccatggcccccatcatcatcagccagaggacagcctag

SEQ ID NO: 345464 - DNA, 1692 bp, Artificial Sequence
  derived and/or modified sequence
atgacagtgctggagatcaccctggccgtcatcctgaccctgctgggcctggccatcctggccatcctgctgacccgctgggcccggaggaagcagagcgagatgcacatcagccgctacagcagcgagcagagcgcccggctgctggactatgaagatggccggggcagcagacatgcctacagcacccagagcgacaccagctgtgacaaccgggagaggagcaagagggactacacccccagcaccaacagcctggtgtccatggccagcaagttcagcctgggccagacagagctgatcctgctgctgatgtgcttcatcctggccctgagccgcagcagcatcggcagcatcaagtgcctgcagaccacagaggagctgcccagcaggacagctggggccatgatgcagttcaccgcccccatccctggggccaccggccccatcaagctgagccagaagaccatcgtgcagaccccaggccccatcgtgcagtacccaggccccaatgccggcccccccagcgccccccggggcccccccatggcccccatcatcatcagccagaggacagcccgcatcccccaggtgcacaccatggacagcagcggcaagatcaccctgacccctgtggtgatcctgaccggctacatggatgaggagctggccaagaagccctgcagcaagatccagatcctgaagtgtggcggcacagcccggagccagaacagccgggaggagaacaaggaggccctgaagaatgacatcatcttcaccaacagcgtggagagcctgaagagcgcccacatcaaggagcctgagcgggagggcaaaggaacagacctggagaaggacaagattggcatggaggtgaaggtggacagtgatgctggcatccccaagaggcaggagacccagctgaagatcagcgagatgagcatcccccagggccagggcgcccagatcaagaagtctgtgtctgatgtgccccggggccaggagagccaggtgaagaagtctgagagcggcgtgcccaagggccaggaggcccaggtgaccaagagcggcctggtggtgctgaagggccaggaggcccaggtggagaagtctgagatgggcgtgccccggcggcaggagagccaggtgaagaagagccagagcggcgtgtccaagggccaggaggcccaggtgaagaagcgggagagcgtggtgctgaagggccaggaggcccaggtggagaagtctgagctgaaggtgcccaagggccaggagggccaggtggagaagacagaagcagatgtgcccaaggagcaggaggtgcaggagaagaagtctgaggccggcgtgctgaagggccctgagagccaggtgaagaacacagaggtgtctgtgcctgagaccctggagagccaggtgaagaagtctgagagcggcgtgctgaagggccaggaggcccaggagaagaaggagagctttgaggacaagggcaacaatgacaaggagaaggagagagatgctgagaaggaccccaacaagaaggagaagggggacaagaacaccaagggggacaagggcaaggacaaggtgaagggcaagcgggagagcgagatcaatggagagaagagcaagggcagcaagagggccaaggccaacacaggcaggaagtacaacaagaaggtggaggagtag

SEQ ID NO: 345465 - DNA, 582 bp, Artificial Sequence
  derived and/or modified sequence
atgaccgtgctggagatcaccctggccgtgatcctgaccctgctgggattggccattctggcaatcctgttgacccgatgggccagacggaagcagagcgagatgcacatctcacgttactcaagcgaacagtcagcccggctccttgattacgaggatggacggggctctcggcacgcttactccacccaatctgatacgtcgtgtgacaaccgggaaaggtctaaacgcgactatacaccatccactaatagtttagtgagcatggcgtcaaaattctcactcgggcagactgagctcatactcctgctaatgtgtttcattctcgctctttctagatcctcgatcggcagtattaagtgcctccagactacagaagaattaccatcaagaaccgcaggagctatgatgcagttcaccgccccaatcccgggcgctacagggcccattaagttaagccagaagacaatcgtccaaactcctggaccaatcgtccaatatcctggccccaatgcaggtcccccctccgcaccgaggggccctccgatggcccccattataataagccagcgtacagcctag

SEQ ID NO: 345466 - DNA, 582 bp, Artificial Sequence
  derived and/or modified sequence
atgaccgtgctggagatcaccctggccgtgatcctgaccctgctgggcctggctattttagctatcctcctaacgagatgggcaaggcgcaagcaatctgaaatgcacatctctcgctattcatcggagcagagcgcgcggcttctggactacgaggacggcaggggctctcgccatgcctactccacacagtccgacactagctgtgacaatagggagaggtcgaaacgagactacacacctagcactaattccttggtgtctatggctagtaagttttcactggggcagacggaactcatactacttctaatgtgtttcatcctggctctgtcacggtcaagcattggctctattaaatgcctgcaaacgactgaagagctgccctcaagaaccgcaggagcaatgatgcaattcactgctccaatccctggagccactggtccgatcaagctgagtcaaaagactattgtgcagacgcccggaccgatcgttcagtacccaggccccaacgccggacccccaagtgcccccaggggccctcccatggctccgataattatatctcagcgaactgcgtag

SEQ ID NO: 345467 - DNA, 1692 bp, Artificial Sequence
  derived and/or modified sequence
atgaccgtgctggagatcaccctggccgtgatcctgaccctgctgggactggctatcctggcaatccttttaacccgctgggccaggcgaaagcagtcagaaatgcacatttctcgctatagttccgagcaaagcgcacggttactggactatgaggatggacggggttctaggcacgcctacagtactcaatcagacacttcttgtgataacagggagcgctctaagcgagactatacaccttcaactaacagtctcgtgagcatggcgtctaagttttctttaggccagaccgagctgatcttgctgcttatgtgctttattttagccctgtcaaggtcttcaattgggtcaatcaaatgcttacagactacagaggaactaccttcacgcactgccggtgccatgatgcagtttacggcaccaatcccgggcgccacaggccccatcaagctttcccagaaaaccattgtgcagacacccggccccattgtacagtatccaggcccaaatgcgggacccccctcagcacccagaggccctccaatggctccaataataatctcccagcgcacagcaaggattccccaggtccacactatggactcttctggaaagatcacactgacccccgtagttattctcacaggatacatggatgaggagttggcgaagaaaccatgcagtaagattcagattctgaagtgcggcgggaccgctagatcgcagaattctcgtgaagagaataaagaggcccttaaaaacgatatcatttttaccaacagcgtagagtcactgaagtccgctcacattaaggagcctgaacgagaaggtaaaggcaccgacctcgagaaagacaaaatcgggatggaggtgaaagtagatagcgatgcagggatccctaagagacaggaaactcagttgaaaatcagcgagatgtccattccacaggggcagggcgcccagatcaagaagtccgtgtccgacgtgccgcgcggtcaagagtcccaggtaaaaaagagcgagagtggcgttcccaagggccaggaggcacaggtgaccaaaagcgggctggttgtgctgaagggtcaagaggcacaggtggaaaagtctgaaatgggggtgccccgacgtcaggagagccaggttaaaaagtcccagtcaggggtctctaaggggcaggaagcccaggtgaaaaagagagaatcagttgttctgaaaggtcaggaagcacaggtcgaaaaatccgagctgaaggtcccaaagggacaggaggggcaggtggaaaagacagaggccgacgtgcctaaagagcaggaagtgcaagagaagaagagtgaagctggagtgctgaagggcccggaaagccaggtgaaaaacactgaggtctccgtacccgagacgttagaatcacaggttaagaagtcggagtcaggagtgctcaagggacaagaagctcaggagaaaaaagagagttttgaagataagggaaacaatgacaaagaaaaggaacgcgacgcagagaaggacccaaacaagaaggaaaagggggacaagaacacaaagggggataagggcaaggacaaagtcaaggggaagagagagtctgagatcaatggagagaaaagcaagggcagtaagagggccaaagcaaatacgggacggaagtataataaaaaggtcgaagagtag

SEQ ID NO: 345468 - DNA, 582 bp, Artificial Sequence
  derived and/or modified sequence
atgactgtgctggagatcaccctggcggtgattctgactctgctgggactcgccatactcgcaattttgctgacgcgatgggctcgcaggaagcagagcgagatgcacatcagccgttacagttccgaacaatccgccagactgctcgattacgaggacggcagagggagtcgacacgcttattccacccagtccgatacatcatgtgataaccgtgaacgcagtaagagagactatacgccctcgaccaacagccttgtatccatggccagcaagtttagtctcgggcagaccgaattgatccttcttcttatgtgcttcatattagctctgtccaggtcgagtattggcagtatcaagtgtctccagactacggaggagctgccatcccgcaccgcgggtgctatgatgcagtttaccgcacctataccaggcgctaccgggccaatcaagctaagccaaaaaactattgtgcagacacctgggcctatcgttcagtatcccggtcccaacgctggaccaccctccgccccacggggtccgcctatggcacccatcatcatatctcagcggactgcttag

SEQ ID NO: 345469 - DNA, 582 bp, Artificial Sequence
  derived and/or modified sequence
atgacggtgctcgaaatcaccctagctgtaattcttacattactggggctagctattctagccatcctgttaactcgctgggccagacgcaagcagagcgagatgcatataagtcgatattcgagtgagcagtccgcacgtctgcttgactacgaagacggaagagggagtcgacacgcctattcaactcagtctgacacaagttgtgacaaccgcgagcgaagtaaaagggattatacccccagcacaaattctctcgtctctatggctagcaaattttcactgggacagaccgaactgatcttactgcttatgtgctttatcctggcactgagccgtagctccatcggcagcataaagtgcctgcagaccacggaagaactgcccagccggacagctggcgctatgatgcagttcaccgcgccaatcccaggcgctactggtcccatcaaacttagccagaaaactatagttcagactccaggcccaatagttcagtacccagggccaaatgcaggacccccatcagcgccaagaggccctcccatggcacccatcattatatctcagaggaccgcgtag

SEQ ID NO: 345470 - DNA, 1692 bp, Artificial Sequence
  derived and/or modified sequence
atgactgtgctggaaattaccctcgcagtgatcctaacgctgctgggtttggccatactggcaatactgctaactcggtgggcacgcagaaagcagagtgagatgcacatatcacgatactcttctgagcagtctgctcgcctactcgactacgaagacggcaggggatcaaggcacgcatactcgacccaaagtgatacttcctgtgacaatcgcgaaaggtcgaagcgcgactacacgcccagcacgaactctcttgtttcaatggccagtaagttctcgttgggccagaccgaacttattctgctgttgatgtgctttatcttggccttgtcccgatcatccatcggtagcattaaatgtctacaaactaccgaggagttgccctctagaaccgccggtgcaatgatgcagttcactgcccctattcccggtgcgaccggacctattaagctgagtcagaagaccatagtgcagacccctggccctattgtacaataccccggacccaatgcagggccaccttccgcaccacgaggacccccaatggctcctattattatctcccagcggacggccagaatcccacaagttcacacgatggactccagcggtaaaattactctgaccccagttgtgatactgacaggttacatggatgaagaattggccaagaagccttgttccaaaatccagattttaaagtgcggtggaacagcacgtagtcagaactcccgcgaagagaacaaagaggcgctaaagaacgacatcattttcacaaacagtgtggagtctcttaagagcgcccatatcaaagaacctgaaagggaaggcaagggtaccgatcttgaaaaggataagataggaatggaggtgaaagtggattccgatgccggaattccaaaacggcaggaaactcagctaaaaatttccgagatgagtatccctcaggggcagggcgctcagatcaagaagagcgtgagcgacgttccccgaggtcaggaatctcaagtgaagaagtccgaatctggagtgcccaaagggcaagaggctcaggtgacaaagtcagggctggtcgtgctgaagggacaggaggcgcaggtggagaagtccgaaatgggggtgccaagacgccaggaatctcaagtaaaaaagagccagagcggagtctcaaaggggcaggaagcccaagtgaaaaagcgtgagagtgttgtgttgaaggggcaagaagcccaagtggaaaagtccgagctgaaagttcctaaagggcaggagggccaggtggaaaagacagaggccgatgtcccgaaggaacaagaggtacaggagaagaagtcggaggcgggtgtgctaaaaggtcccgagtctcaggtgaagaatactgaggtctccgttcctgaaaccctggaatctcaagtgaagaaatccgaatctggagtcctcaaaggacaggaggcgcaggagaaaaaggagtctttcgaggataagggcaacaacgataaagagaaagagcgagatgcagagaaggaccccaacaaaaaggaaaaaggcgataagaacacgaaaggggataaaggtaaagacaaggtaaagggaaaacgcgagagcgagatcaatggagagaaatctaagggaagcaaacgggctaaggctaatactgggaggaagtacaataagaaggttgaggagtag

SEQ ID NO: 345471 - protein, 258 aa, Artificial Sequence
  derived and/or modified sequence
MIPLQKDNQEEGVCPICQESLKEAVSTNCGHLFCRVCLTQHVEKASASGVFCCPLCRKPCSEEVLGTGYICPNHQKRVCRFCEESRLLLCVECLVSPEHMSHHELTIENALSHYKERLNRRSRKLRKDIAELQRLKAQQEKKLQALQFQVDHGNHRLEAGPESQHQTREQLGALPQQWLGQLEHMPAEAARILDISRAVTQLRSLVIDLERMAKELDTNTLKNAGDLLNRSAPQKLEVIYPQLKKGVSELLLQPPQKL

SEQ ID NO: 345472 - DNA, 777 bp, Artificial Sequence
  derived and/or modified sequence
atgatccccctgcagaaggacaaccaggaggagggcgtgtgccccatctgccaggagagcctgaaggaggccgtgagcaccaactgcggccacctgttctgcagagtgtgcctgacccagcacgtggagaaggccagcgccagcggcgtgttctgctgccccctgtgcagaaagccctgcagcgaggaggtgctgggcaccggctacatctgccccaaccaccagaagagagtgtgcagattctgcgaggagagcagactgctgctgtgcgtggagtgcctggtgagccccgagcacatgagccaccacgagctgaccatcgagaacgccctgagccactacaaggagagactgaacagaagaagcagaaagctgagaaaggacatcgccgagctgcagagactgaaggcccagcaggagaagaagctgcaggccctgcagttccaggtggaccacggcaaccacagactggaggccggccccgagagccagcaccagaccagagagcagctgggcgccctgccccagcagtggctgggccagctggagcacatgcccgccgaggccgccagaatcctggacatcagcagagccgtgacccagctgagaagcctggtgatcgacctggagagaatggccaaggagctggacaccaacaccctgaagaacgccggcgacctgctgaacagaagcgccccccagaagctggaggtgatctacccccagctgaagaagggcgtgagcgagctgctgctgcagcccccccagaagctgtag

SEQ ID NO: 345473 - DNA, 777 bp, Artificial Sequence
  derived and/or modified sequence
atgattcccctgcagaaggacaatcaggaggagggagtttgcccgatctgtcaagaatcactgaaggaagccgtttccaccaactgcggccacctgttttgccgcgtgtgcctgacccaacacgtggagaaagcctccgcgtctggcgtattctgttgtccactctgcagaaagccctgttccgaagaggtactgggaaccggttacatatgtcccaatcatcagaaacgcgtctgcaggttctgcgaagagagtcggctgctgctgtgcgttgagtgcctggtgtcccctgaacatatgagtcatcacgagctgactattgagaatgcactatcccactataaggagaggttaaaccggaggtctagaaaactgaggaaggatatcgcagagctccagcgacttaaggcacagcaagaaaagaagctgcaggcattacaattccaggtggatcacggtaatcatagacttgaggccggccccgagagccagcaccagacccgtgagcaactcggcgcactgccacaacaatggttagggcagctggaacatatgccggccgaagccgctagaatcctcgacatcagcagagctgtgacccagctgcggagtctggtgattgatttggagaggatggctaaagagctggacaccaatacgctgaagaatgctggagatttactaaaccgatccgccccccagaaactcgaagtgatatatccccaactcaaaaagggggtatctgaattgctcctgcagccaccgcagaagttatag

SEQ ID NO: 345474 - DNA, 777 bp, Artificial Sequence
  derived and/or modified sequence
atgatccctcttcagaaagataatcaggaagaaggcgtttgccctatttgtcaggagtcactaaaggaggcagtgtcaaccaactgcgggcatctcttctgtagagtctgtctcacacagcatgtggagaaggcctccgcctctggcgttttctgttgcccactgtgtcgcaagccatgctccgaggaggtgctgggcactggatatatttgcccaaatcaccagaagcgggtttgcagattttgtgaagagtcccgcttactgctctgtgtcgagtgccttgtatcacctgaacatatgagccaccacgagctgaccattgaaaacgcgctgtcacattataaagagaggctcaaccggcgctcgcgaaagctgcggaaagatatcgcagagctccagcgactcaaagctcaacaggagaaaaagctgcaggccctccagtttcaggtcgatcatggcaatcaccgactcgaggccggccctgagtcccagcaccaaactagagaacagttgggcgctctgccccagcagtggttaggccagctggaacacatgcccgccgaggccgctcgtatcctcgacatctcccgtgctgtgacccaactgagaagcctagttattgacctggagcgtatggcaaaggagctcgatacgaacactctcaagaatgcaggagacttgttgaacaggagcgctccacaaaaactagaagtgatatatcctcaactcaaaaagggggtttcagagctgctgctccagccaccacaaaaactgtag

SEQ ID NO: 345475 - DNA, 777 bp, Artificial Sequence
  derived and/or modified sequence
atgatccccctgcagaaggacaaccaggaggagggcgtgtgccccatctgccaggagagcctgaaggaggccgtgtccaccaactgtggccacctgttctgccgggtgtgcctgacccagcacgtggagaaggccagcgccagcggggtcttctgctgccccctgtgcaggaagccctgcagcgaggaggtgctgggcaccggctacatctgccccaaccaccagaagagggtgtgccgcttctgtgaggagagccggctgctgctgtgtgtggagtgcctggtgtccccagagcacatgagccaccacgagctgaccattgaaaatgccctgagccactacaaggagcggctgaacagaagaagcaggaagctgaggaaggacattgctgagctgcagaggctgaaggcccagcaggagaagaagctgcaggccctgcagttccaggtggaccacggcaaccaccggctggaggccggccctgagagccagcaccagacccgggagcagctgggcgccctgccccagcagtggctgggccagctggagcacatgcctgctgaggccgcccgcatcctggacatcagcagagctgtgacccagctgcggagcctggtgattgacctggagaggatggccaaggagctggacaccaacaccctgaagaatgctggggacctgctgaacagaagtgccccccagaagctggaggtgatctacccccagctgaagaagggcgtgtctgagctgctgctgcagcccccccagaagctgtag

SEQ ID NO: 345476 - DNA, 777 bp, Artificial Sequence
  derived and/or modified sequence
atgatccccctgcagaaggacaaccaggaggagggcgtgtgccccatctgccaggagtccctgaaagaagccgtctccaccaactgtgggcatttgttctgccgggtatgtctaacgcagcacgttgaaaaggcttctgcaagcggcgtgttttgctgtccactgtgtcgcaaaccttgttcagaagaagtcttggggaccgggtatatatgtccaaatcatcagaagcgagtttgccggttctgtgaagagtctcggctcctgttatgtgtggagtgccttgtgagtcccgaacacatgagccaccacgagttgaccatcgaaaatgctctttcccattacaaggaacggcttaataggagatcgcgtaaattgagaaaggatatcgccgagctacagagactgaaagctcagcaggagaagaagctccaggctttacagttccaggtggaccacggcaatcatcgtctggaagccggacctgagagtcagcaccagacgagagaacagctgggggcccttcctcagcagtggctgggccagctagagcacatgccggccgaagcggccagaatcctggacatttcaagagcggttacacagctgcgaagtctggtgattgacttggagagaatggccaaggagctcgacacaaacacccttaagaacgccggggacctgttgaatcggtcagcacctcaaaagctagaagtgatctatccacagttaaagaaaggagtcagtgaactgctgctgcagccaccccagaagctgtag

SEQ ID NO: 345477 - DNA, 777 bp, Artificial Sequence
  derived and/or modified sequence
atgatccccctgcagaaggacaaccaggaggagggcgtgtgccccatttgtcaggagagtctgaaagaagccgtttctaccaactgcggccacttattctgtcgagtgtgtttgacacagcacgtagagaaggccagcgcttcaggtgtgttctgctgccctctgtgcagaaaaccgtgtagcgaggaagtgctcgggacgggctatatttgtcccaatcatcaaaagcgagtgtgtaggttctgcgaggagtcccggttactgttatgtgtggagtgcctcgtgtcgcccgaacacatgtcccaccatgagcttacaattgaaaatgcactgtcacactataaggagaggctgaatagaaggtccaggaagctgcgcaaggatatcgccgagctgcaacgtctgaaggcccagcaagagaaaaagctgcaagctctgcagttccaggtcgaccacggcaaccaccgcctggaagccggccctgagagtcagcatcagacacgggagcagctgggcgcactgcctcagcaatggttgggccagctggagcatatgcctgctgaggctgcacggatcctggatatcagcagggctgtgacacagctccgctcactggtaatagatctggaaagaatggcaaaggaactggacacaaacactttaaaaaatgcaggggacctcctgaatagaagcgccccgcagaaattagaggttatctaccctcaattaaaaaagggagtgagcgagctgctcctccagcccccccaaaaattgtag

SEQ ID NO: 345478 - DNA, 777 bp, Artificial Sequence
  derived and/or modified sequence
atgattccactgcagaaggacaaccaggaggagggcgtctgcccaatatgccaagagtcattaaaagaagccgtgtctaccaattgcgggcacttgttctgtagggtatgtctgacacagcacgtagagaaggcttctgcatcaggcgtgttctgctgccccctgtgccgcaagccctgtagcgaggaggtgctgggaactggctacatatgtcccaatcatcagaagagagtttgtagattttgtgaggaatccagacttcttctgtgtgtggagtgtcttgtcagccctgagcacatgtcacaccatgaactgaccatagaaaacgcgctctcccattacaaggaacggctgaacaggcgctcacggaagctgaggaaagacatcgccgagctccagaggctaaaggctcagcaggagaagaagcttcaggctctccaattccaagtagatcatggaaaccataggcttgaagccggtccggaatcccagcaccagacaagagaacagttaggcgcactgcctcagcagtggctcgggcagttagaacacatgcccgctgaagccgctcgtattctggatatttcccgtgcggtaactcagctaaggagcctggtaattgacctcgaacgcatggccaaggagcttgatacgaacacactgaagaacgccggtgaccttctgaaccgaagcgccccacaaaaactagaggtgatttatccacagctgaagaagggggtttctgaacttttgttacaacctccacagaaattgtag

SEQ ID NO: 345479 - DNA, 777 bp, Artificial Sequence
  derived and/or modified sequence
atgatacctttgcaaaaggacaaccaggaggagggggtgtgtccaatttgccaagagagcttgaaagaggcagtttctacgaattgcgggcaccttttttgccgcgtttgtctgacccagcatgtggagaaagctagcgctagcggggtcttttgctgtcctctgtgcagaaagccttgcagcgaggaggtcctgggtactggctacatctgccctaaccaccagaagagggtgtgtagattctgcgaggagtcgcggctattattgtgtgtcgagtgcctggtgtcaccagaacacatgtcacaccatgagctgaccatagagaacgctctgtcacactacaaagaacgcctgaatcgtaggagcaggaagctgaggaaggacatcgcagagttgcaaaggttaaaagctcagcaggagaaaaagctgcaggccctgcagttccaggtggaccacggcaaccatcgcctcgaggccggaccagaaagtcagcaccagacccgcgaacaattgggggctcttccacagcaatggctgggccagctggagcatatgccagccgaggccgctagaattcttgacatttcaagggccgtaacccagcttcgctctctggtcattgacttagagagaatggctaaagagttggacacaaacacccttaaaaacgctggggacctcttaaatcgctctgcacctcaaaagctggaggtcatctatccacagctgaagaagggcgtgagcgaacttctccttcaaccaccccagaaactctag

SEQ ID NO: 345480 - DNA, 2086 bp, Artificial Sequence
  derived and/or modified sequence
ataagaaccactcgtctgctggccatctctccaggtctggagccagagaagatgatctgaaattgtagcaggagaaattgaggtgtatgaaaaataatttcaagtttaacaaacacaaggaaaccgcagggtccatgtcaaagctgatgagctatttctgaaactcgtgcagaattgtggtttgtgtggtctatgtcacggcacccttgagggagagtgggcaattgcctgaacttggaggctgtgtcctgtccccaggctgctccagggctgcctccttccgactgggccttcttatctgggactgttgagggcaacaggccttccgaagaccagtgaagaaggaggccctgcagacaggaggctgacagggtaggaacaaggccatgatccctttgcagaaggacaaccaggaggagggtgtctgccccatctgccaggagagcctgaaggaggccgtgagcaccaactgcggacatctcttctgtcgagtgtgcctgacacagcatgtggagaaggcctcagcctctggggtcttctgctgccccctctgccggaagccctgttctgaggaggtgctagggacaggctatatctgccccaaccaccagaagagggtgtgcaggttctgtgaggagagcagacttcttctatgtgtggaatgcttggtgtcccctgaacacatgtctcatcatgaactgaccattgaaaatgccctcagccactacaaggaacgactcaatcgccggagcaggaagctcagaaaggacattgcagaacttcagcggctcaaggctcagcaggagaagaaactgcaggctctgcagtttcaggtagaccacgggaaccacaggctggaggctgggccggagagccagcaccaaaccagggaacagctgggtgccctcccccagcagtggctgggccagctggagcacatgccagcagaagcggccagaatccttgacatctccagggcagtaacacagctcagaagcctggtcattgatctggaaaggatggccaaggaattagacaccaacacactgaagaatgctggtgacttactgaacaggagtgctccacagaaattagaggttatttatccccagttgaagaaaggagtcagtgaattgcttcttcagccccctcagaagctctgacctgttcatccctgggacacctcacttcaggctcacctcagcctcctctctctccttcctccaacctgtccaggcccccactgggtctacccagtgcatcttcgggcctgccagctcctgaacatgtcaccatttcttcatgtccacagtcatcacctgatgcctgaccctctgactcttggacgatagccagcctccttccaggacaggctcatgcttggggctgccactgtggaggtcggggcccatggtctccaggagcatttgtgaaatctccattttgcctgtaaactgatggtagtgcccatctctcacaatctcattcaaataggatcctccaggcctctgaatggcccgagctcatcagcagtgacatcacctcacatgtggagcccagctgagttcctgcagtacttgttgtctgtaccactcacctggcacttatttattattgttgtggaagacagactcaaagacagcctcccttcgtgatcctcacctcttggaattcatgcccttgtttggtcccctccccttgagtgtaagtgggatctgtgacttgcttctaatcaatggaataaggcaaaggtgatagggtgtcactctggcaactgtgttgcattgtatagaactcctccttgctggcccacccttttagagcccctcctaggagccaagagcagcttccagccaacaacaagcagaggccctcagtcttgtggctgcaagaacctgaattctgccaacaacctgagtgagcttggaagcagattcttccccaactgagccggataagaacctagtccagccaacaccttgattatagtcttgtgagtacctaagctgaggacccagtgaagctgtgccaaaatttcccacccacagaaacagtgtgacaataaatgtgtgtgtgtttttttgtt

SEQ ID NO: 345481 - DNA, 2086 bp, Artificial Sequence
  derived and/or modified sequence
ataagaaccactcgtctgctggccatctctccaggtctggagccagagaagatgatctgaaattgtagcaggagaaattgaggtgtatgaaaaataatttcaagtttaacaaacacaaggaaaccgcagggtccatgtcaaagctgatgagctatttctgaaactcgtgcagaattgtggtttgtgtggtctatgtcacggcacccttgagggagagtgggcaattgcctgaacttggaggctgtgtcctgtccccaggctgctccagggctgcctccttccgactgggccttcttatctgggactgttgagggcaacaggccttccgaagaccagtgaagaaggaggccctgcagacaggaggctgacagggtaggaacaaggccatgatccctttgcagaaggacaaccaggaggagggtgtctgccccatctgccaggagagcctgaaggaggccgtgagcaccaactgcggacatctcttctgtcgagtgtgcctgacacagcatgtggagaaggcctcagcctctggggtcttctgctgccccctctgccggaagccctgttctgaggaggtgctagggacaggctatatctgccccaaccaccagaagagggtgtgcaggttctgtgaggagagcagacttcttctatgtgtggaatgcctggtgtcccctgaacacatgtctcatcatgaactgaccattgaaaatgccctcagccactacaaggaacgactcaatcgccggagcaggaagctcagaaaggacattgcagaacttcagcggctcaaggctcagcaggagaagaaactgcaggctctgcagtttcaggtagaccacgggaaccacaggctggaggctgggccggagagccagcaccaaaccagggaacagctgggtgccctcccccagcagtggctgggccagctggagcacatgccagcagaagcggccagaatccttgacatctccagggcagtaacacagctcagaagcctggtcattgatctggaaaggatggccaaggaattagacaccaacacactgaagaatgctggtgacttactgaacaggagtgctccacagaaattagaggttatttatccccagttgaagaaaggagtcagtgaattgcttcttcagccccctcagaagctctgacctgttcatccctgggacacctcacttcaggctcacctcagcctcctctctctccttcctccaacctgtccaggcccccactgggtctacccagtgcatcttcgggcctgccagctcctgaacatgtcaccatttcttcatgtccacagtcatcacctgatgcctgaccctctgactcttggacgatagccagcctccttccaggacaggctcatgcttggggctgccactgtggaggtcggggcccatggtctccaggagcatttgtgaaatctccattttgcctgtaaactgatggtagtgcccatctctcacaatctcattcaaataggatcctccaggcctctgaatggcccgagctcatcagcagtgacatcacctcacatgtggagcccagctgagttcctgcagtacttgttgtctgtaccactcacctggcacttatttattattgttgtggaagacagactcaaagacagcctcccttcgtgatcctcacctcttggaattcatgcccttgtttggtcccctccccttgagtgtaagtgggatctgtgacttgcttctaatcaatggaataaggcaaaggtgatagggtgtcactctggcaactgtgttgcattgtatagaactcctccttgctggcccacccttttagagcccctcctaggagccaagagcagcttccagccaacaacaagcagaggccctcagtcttgtggctgcaagaacctgaattctgccaacaacctgagtgagcttggaagcagattcttccccaactgagccggataagaacctagtccagccaacaccttgattatagtcttgtgagtacctaagctgaggacccagtgaagctgtgccaaaatttcccacccacagaaacagtgtgacaataaatgtgtgtgtgtttttttgtt

SEQ ID NO: 345482 - protein, 574 aa, Artificial Sequence
  derived and/or modified sequence
MLENYGNMVSLGFPFPKPPLISHLEREVDPCVQDPQDRESLSCSYPVSADKMWPENEKASSQQEIFENGEAYWMKFNSLLKVDSRDPKVREVCVQDVKLENQWETSIREKLREEKEGSEEVTCKKGKNQKVLSKNLNPNSKHSQCNKVLIAQKLHECARCGKNFSWHSDLILHEQIHSGEKPHVCNECGKAFKTRNQLSMHRIIHTGEKPFNCTQCGKAFNSRSALCRHKKTHSGEKPHECRDCGKAFKTRNRLCMHQLIHTGEKPYKCNCCGKAFQFKHSLTIHGRIHTGEKPYECEECGKAFSGSSDLTKHIRIHTGERPYECSKCGRAFSRSSDLSKHKRIHTREKHYGCPQCGKDFSIKAELTKHRRIHTEEKRYRCEECGKAFRHNCKRRAHEREHTGEKPYQCRDCGKTFQDQHCLTIHQRIHTGEKPYKCLECGKAFSGKSNLTNHRRIHTGEKPHKCEVCGMAFHHSSVLRQHKRIHTGEKPYTCSECGTSFRQGSALIGHKRVHTGEKPYECEECGKAFRVSSNLTGHKKRKHQVWSTHELDGSRKSLSPVTVSQTSVVSILTSA

SEQ ID NO: 345483 - DNA, 2503 bp, Artificial Sequence
  derived and/or modified sequence
atatttctgtttctcatttcttggggagagtaccggcgggaagcatccattcatatattcattcagtcagctaatttttaatccagcacatactattgcaagcgctgttttaggcgttgagaatacaactgtgaacaagacgacaaaaattcctgccctcatggagcctaagagcctagattttagcgaaggtagaaccaccgtaaacaatgtatatattaataagtaacttatgcaccatactggaaaattataaagtgctatagaggaaaagaagaattcatgtaaagcaaggaggctggcatcaactggagccacttcacagcttgtttgagaactggatctgaccagtaggaagaaaccaggacagcagtggaagactgttaaagaaacctgagtaaaaagatgcaggaggtaagaagaggagggtctgtgatacatcacaaggaggaagaaggagaagtgagtccaagagtcagtgacatttgaggatgtagctgtgaacttcactaacagggagtggcagtgtctgacctacgctcaaaggcatctctataaggatgtgatgttggaaaattatgggaacatggtatcacttggatttccatttcctaaacctcctttaatctctcatctggagcgagaagtagacccctgtgtgcaggatccacaggacagggagtccctaagctgctcctacccagtgtcagctgacaagatgtggcctgagaatgaaaaggcaagttcacaacaagagatttttgaaaatggagaagcctactggatgaaatttaacagtctcctaaaagttgattcccgggatcctaaggttagagaagtttgtgttcaggatgtcaaattagagaatcaatgggaaacatctataagggagaaactgagagaagagaaagaaggctctgaggaagtgacctgcaaaaaaggaaagaaccagaaagtgcttagtaaaaacttgaatccaaactcaaaacatagtcaatgtaataaagttcttatagcacagaaactccatgaatgtgccaggtgtggcaaaaacttcagttggcactcagatctaattctccatgagcaaattcattctggtgagaaaccccatgtgtgtaatgagtgtgggaaagcattcaagaccagaaatcagctttctatgcaccggataatccacacaggggagaaaccttttaattgcacccagtgtgggaaggctttcaacagtagatcagctctttgccgacataaaaaaacccacagtggggagaagcctcacgagtgcagggactgtgggaaggccttcaagaccaggaaccgtctctgtatgcatcagcttatccacaccggggagaagccttacaaatgtaactgctgtgggaaggccttccagtttaagcattcccttaccatccatggcagaatccacactggggagaagccatatgaatgtgaggagtgcgggaaggccttcagtgggagttcagacctcaccaaacacataagaatccacactggggaacgaccttatgagtgcagcaagtgtggaagggccttcagtcggagctcagacctaagcaaacacaaacgaatccatactcgggagaaacactatgggtgtccccagtgtggaaaagacttcagcatcaaggcagaactcaccaaacacagaaggatccacactgaagagaaacgttacaggtgtgaggagtgtgggaaagcctttcgtcataactgtaagcgcagggctcatgaacgagagcatacaggggagaagccctatcaatgcagggattgtgggaaaaccttccaagatcagcactgccttaccatccatcagagaatccacactggagagaaaccttacaaatgtttagagtgtgggaaagctttcagtgggaagtcaaacttgaccaatcatcgaagaattcacactggagagaagcctcacaaatgtgaggtatgtggaatggccttccatcatagttcagtcctgaggcagcacaaaagaatccacactggtgagaagccatacacctgcagtgagtgtggcacgtccttccgtcagggctcagctctgattggacataagcgagttcatactggggagaaaccttatgaatgtgaggaatgtggaaaagcttttagagtgagctcaaatcttactggacataagaaaagaaaacatcaagtatggagtacccatgaacttgatgggagtaggaaatccctctctccagtgactgtttctcagacctcagtagtcagtattttgaccagtgcctgagtataacgattctggtgttactttctgtttttcctacctcttaggctggtccttctgtctcttatattagttattcctgatttcctgacccttaattgtgagattccccaaagacattgtcctttaccttcttattcactattttttcagtgagcacatttacttccaagagtttatcaatcacttcctaatattaataaacacttattagtg

SEQ ID NO: 345484 - protein, 224 aa, Artificial Sequence
  derived and/or modified sequence
MRVTAPRTLLLLLWGAVALTETWAGSHSMRYFYTAMSRPGRGEPRFITVGYVDDTLFVRFDSDATSPRKEPRAPWIEQEGPEYWDRETQISKTNTQTYRENLRTALRYYNQSEAGSHIIQRMYGCDVGPDGRLLRGYDQDAYDGKDYIALNEDLSSWTAADTAAQITQRKWEAARVAEQDRAYLEGLCVESLRRYLENGKETLQRADQEQKSLFPAQRLELSNE

SEQ ID NO: 345485 - DNA, 741 bp, Artificial Sequence
  derived and/or modified sequence
atggccagcgtgggcagaagagagggcaccgccggcggcggcgccggccccggcgagcccagaagagaggagggcagagccggcctgagccccagcagcccccccggcagccacagcatgagatacttctacaccgccatgagcagacccggcagaggcgagcccagattcatcaccgtgggctacgtggacgacaccctgttcgtgagattcgacagcgacgccaccagccccagaaaggagcccagagccccctggatcgagcaggagggccccgagtactgggacagagagacccagatcagcaagaccaacacccagacctacagagagaacctgagaaccgccctgagatactacaaccagagcgaggccggcagccacatcatccagagaatgtacggctgcgacgtgggccccgacggcagactgctgagaggctacgaccaggacgcctacgacggcaaggactacatcgccctgaacgaggacctgagcagctggaccgccgccgacaccgccgcccagatcacccagagaaagtgggaggccgccagagtggccgagcaggacagagcctacctggagggcctgtgcgtggagagcctgagaagatacctggagaacggcaaggagaccctgcagagagccgacccccccaagacccacgtgacccaccaccccatcagcgaccacgaggtgaccctgagatgctgggccctgggcttctaccccgcctag

SEQ ID NO: 345486 - DNA, 675 bp, Artificial Sequence
  derived and/or modified sequence
atgagagtgaccgcccccagaaccctgctgctgctgctgtggggcgccgtggccctgaccgagacctgggccggcagccacagcatgagatacttctacaccgccatgagcagacccggcagaggcgagcccagattcatcaccgtgggctacgtggacgacaccctgttcgtgagattcgacagcgacgccaccagccccagaaaggagcccagagccccctggatcgagcaggagggccccgagtactgggacagagagacccagatcagcaagaccaacacccagacctacagagagaacctgagaaccgccctgagatactacaaccagagcgaggccggcagccacatcatccagagaatgtacggctgcgacgtgggccccgacggcagactgctgagaggctacgaccaggacgcctacgacggcaaggactacatcgccctgaacgaggacctgagcagctggaccgccgccgacaccgccgcccagatcacccagagaaagtgggaggccgccagagtggccgagcaggacagagcctacctggagggcctgtgcgtggagagcctgagaagatacctggagaacggcaaggagaccctgcagagagccgaccaggagcagaagagcctgttccccgcccagagactggagctgagcaacgagtag

SEQ ID NO: 345487 - DNA, 741 bp, Artificial Sequence
  derived and/or modified sequence
atggcctccgtgggacgcagggaaggtacggctggtggcggagctggccctggcgagccacggcgcgaggaaggcagagcaggtttgagtccatcgagtccgccgggttcccactctatgcgctacttttacactgccatgtccaggcccggtagaggggagcccaggttcatcactgtgggttacgtggatgacacactgtttgtgaggttcgacagcgacgcgaccagcccaaggaaagaacctagagccccttggatcgagcaggagggacctgagtattgggatcgggagacacagatatccaagacaaacacccaaacctacagagagaacctaagaaccgccctgagatattataatcaatcggaagctggatcacacataattcagaggatgtatggatgcgatgtggggcctgatggacgccttctgcgaggttacgaccaggacgcgtatgacggcaaggactacattgcactcaatgaagatctctctagctggacagccgcagacacggcggcccagataacccaacgtaaatgggaggccgcaagagttgccgagcaggacagagcatacttggaaggcttgtgtgtggagtccctccgacgatacttggagaacggtaaagaaactttgcagcgagccgatcccccgaagactcatgttactcaccaccccatttccgaccacgaagtcacactgcgctgctgggcgctcggcttttaccctgcctag

SEQ ID NO: 345488 - DNA, 675 bp, Artificial Sequence
  derived and/or modified sequence
atgagagtcacagccccccgcaccctgctgcttctgctttggggagccgtggccttaaccgagacatgggcaggctcccactcaatgagatacttttacaccgccatgtcccgtcccggtcgcggcgaaccgcgcttcattaccgttggctacgtagatgatactcttttcgtgaggtttgactcagacgcaacaagtccccgaaaggagccacgcgctccctggatcgaacaggagggacccgagtactgggatagggaaacccaaattagtaaaacgaacacacagacttaccgcgagaatctaagaacagcattaagatactacaaccagtctgaggccggcagtcacattattcaacggatgtatgggtgcgatgtgggcccagacggacggctgctgaggggttacgatcaagatgcttatgacggcaaagattatattgccttaaatgaggacctttcttcatggacagcagcagatactgctgcccagatcacccagcggaagtgggaagctgccagggttgcggagcaggaccgtgcatacctcgagggtctttgcgttgaatctctgaggaggtacctagagaatgggaaggaaaccttacagagagccgatcaagagcagaagtctctgttcccagcccagagactggagctgtctaatgagtag

SEQ ID NO: 345489 - DNA, 738 bp, Artificial Sequence
  derived and/or modified sequence
atggcctctgtggggaggagagaggggaccgcaggcgggggcgcaggacccggggagccgcgccgggaggagggtcgggcgggtctcagcccctcctcgcccccaggctcccactccatgaggtatttctacaccgccatgtcccggcccggccgcggggagccccgcttcatcaccgtgggctacgtggacgacacgctgttcgtgaggttcgacagcgacgccacgagtccgaggaaggagccgcgggcgccatggatagagcaggaggggccggagtattgggaccgggagacacagatctccaagaccaacacacagacttaccgagagaacctgcgcaccgcgctccgctactacaaccagagcgaggccgggtctcacatcatccagaggatgtacggctgcgacgtggggccggacgggcgcctcctccgcgggtatgaccaggacgcctacgacggcaaggattacatcgccctgaacgaggacctgagctcctggaccgcggcggacaccgcggctcagatcacccagcgcaagtgggaggcggcccgtgtggcggagcaggacagagcctacctggagggcctgtgcgtggagtcgctccgcagatacctggagaacgggaaggagacgctgcagcgcgcggaccccccaaagacacatgtgacccaccaccccatctctgaccatgaggtcaccctgaggtgctgggccctgggcttctaccctgcg

SEQ ID NO: 345490 - DNA, 741 bp, Artificial Sequence
  derived and/or modified sequence
atggcctctgtgggccggcgggagggcacagctgggggcggggccggccctggagagccccggcgggaggagggccgggccggcctgagccccagcagccccccaggcagccacagcatgagatacttctacacagccatgagccggcccggccgcggggagccccgcttcatcaccgtgggctacgtggatgacaccctgtttgtgcgctttgacagtgatgccaccagccccaggaaggagccccgggccccctggattgagcaggagggccctgagtactgggaccgggagacccagatcagcaagaccaacacccagacctaccgggagaacctgaggacagccctgcgctactacaaccagagcgaggccggcagccacatcatccagaggatgtatggctgtgatgtgggcccagatggccgcctgctgcggggctatgaccaggatgcctatgatggcaaggactacatcgccctgaatgaagacctgagctcctggacagctgctgacacagctgcccagatcacccagaggaagtgggaggccgcccgggtggccgagcaggaccgggcctacctggagggcctgtgtgtggagagcctgcggcgctacctggagaatggcaaggagaccctgcagagagctgacccccccaagacccacgtgacccaccaccccatcagtgaccacgaggtgaccctgcgctgctgggccctgggcttctacccagcctag

SEQ ID NO: 345491 - DNA, 675 bp, Artificial Sequence
  derived and/or modified sequence
atgagggtgacagcccccaggaccctgctgctgctgctgtggggcgctgtggccctgacagagacctgggccggcagccacagcatgagatacttctacacagccatgagcaggcctggccgcggggagccccgcttcatcaccgtgggctacgtggatgacaccctgtttgtgcgctttgacagtgatgccaccagccccaggaaggagccccgggccccctggattgagcaggagggccctgagtactgggaccgggagacccagatcagcaagaccaacacccagacctaccgggagaacctgaggacagccctgcgctactacaaccagagcgaggccggcagccacatcatccagaggatgtatggctgtgatgtgggcccagatggccgcctgctgcggggctatgaccaggatgcctatgatggcaaggactacatcgccctgaatgaagacctgagctcctggacagctgctgacacagctgcccagatcacccagaggaagtgggaggccgcccgggtggccgagcaggaccgggcctacctggagggcctgtgtgtggagagcctgcggcgctacctggagaatggcaaggagaccctgcagagagctgaccaggagcagaagagcctcttccctgcccagaggctggagctgagcaatgaatag

SEQ ID NO: 345492 - DNA, 741 bp, Artificial Sequence
  derived and/or modified sequence
atggccagcgtgggccggcgggagggcaccgccggcggcggcgccggccctggtgaaccgcgccgggaagagggaagagctggactaagcccctcctcaccgccgggtagtcactccatgagatacttctacacagcaatgtccaggccgggtaggggggagcctagatttatcacggtcggttacgtggacgacactctgtttgtacggtttgatagcgacgccaccagcccacgaaaagagcctagggccccttggatcgagcaggaaggtcctgagtattgggatagagagacacagatctcgaagaccaatactcagacctatcgcgagaacttgcgcaccgccctgcgctattataaccaatctgaagctggatcccatatcatacagaggatgtatggatgtgatgtggggcccgatgggcggctgctgcggggatatgaccaggatgcctacgatggtaaggattacattgcactgaatgaagaccttagttcctggacggccgccgacacagccgcacaaattacccaaagaaaatgggaagccgctagggtggccgagcaggacagagcttatctcgaaggactgtgcgtggaaagcctgagacggtaccttgaaaatggtaaggaaacgttgcaacgggcagaccctcctaaaacccatgtgacccaccatcccatttcagaccatgaggttactctacggtgttgggcactgggattttaccctgcctag

SEQ ID NO: 345493 - DNA, 675 bp, Artificial Sequence
  derived and/or modified sequence
atgcgggtgaccgccccccggaccctgctgctgctgctgtggggcgccgtcgcgctcacagaaacgtgggctggaagtcattcaatgcgctacttttacaccgcaatgagccggccaggtaggggagagccacgcttcataactgtcgggtatgtggatgacactttgtttgtccggtttgacagcgatgcaacctctcctcgaaaagagccccgagccccatggattgagcaagagggacccgaatactgggacagggagacccagatcagcaagacaaatacgcagacctacagggagaacctacgaactgcactgcgttattataaccagtccgaggctgggtcccacatcatacaaagaatgtacggatgtgacgttgggcccgacggtcgtctcctgaggggctacgaccaggacgcctatgatggcaaggactacatcgccctcaacgaggacctctcctcctggacggccgccgatacagcagcccaaattactcagcgaaaatgggaggccgcccgtgtagcagagcaagatcgcgcatatctagagggtctctgcgtggaatctctaaggcgctatttggaaaatgggaaagagactttacaaagggccgatcaggagcagaaatcacttttcccagctcagcgactagagttgagtaatgaatag

SEQ ID NO: 345494 - DNA, 741 bp, Artificial Sequence
  derived and/or modified sequence
atggcctcagtaggacgaagagaaggcacggccggtgggggagccggaccaggggaacctaggcgggaagagggcagagccggtttgtctccatcgtctcccccaggttcgcatagcatgagatacttttataccgctatgtcccgccctggaaggggggaacccaggtttataacagtgggctatgtcgatgatactctctttgtaagatttgacagcgacgcaacgagcccgagaaaagagcctagggctccctggatagagcaggagggacccgagtattgggacagggagacccagatctcaaaaacgaacactcagacctatcgagaaaacctcagaacagccttgcgctattacaaccagagcgaggcgggtagccacataatacagcgaatgtacggatgtgacgtgggacctgatggtagactgttacgcggatatgaccaagacgcgtatgatggcaaggattatatcgctcttaatgaggacctttcaagttggactgccgctgacaccgccgctcagatcactcagaggaagtgggaagccgcacgggtcgcagagcaggaccgggcttacctcgagggactatgcgtggagtctctacggaggtacctcgaaaatggtaaggagactcttcagcgcgcagatccacccaagactcacgtgacacatcacccaatttcagaccacgaagtgaccctcaggtgttgggccctaggtttttatcctgcttag

SEQ ID NO: 345495 - DNA, 675 bp, Artificial Sequence
  derived and/or modified sequence
atgagagttacagccccacgcacattactacttttactttggggggctgtggctcttacagaaacctgggctggctctcattctatgcggtacttttatactgctatgtctagaccaggccgtggcgaaccccgttttatcaccgtggggtatgtggatgatacactctttgtgcggtttgacagcgatgccacttcgcctagaaaagaaccacgggcaccttggatcgaacaggaggggccagagtactgggatcgcgagactcagatctcgaaaactaacacccagacatacagggagaatttgcggacagcccttcgctactacaatcaatccgaggccggtagtcacattatacagaggatgtatggttgtgacgtgggcccagatggcagactgttgagaggctacgaccaggacgcttatgatgggaaggactatattgccctgaacgaagatctgtcttcttggactgcggctgatacggcggctcagatcacgcagagaaaatgggaggccgctcgcgtagccgagcaggatagggcgtatctcgaaggattgtgcgtggagtctctcaggcggtatttagaaaatggcaaagagactcttcagcgtgcggaccaagaacaaaaatccctgtttccggcacaaagattagagttgagtaatgagtag

SEQ ID NO: 345496 - protein, 343 aa, Artificial Sequence
  derived and/or modified sequence
MKTPRMVVMAPRTLFLLLSGALTLTETWAGSHSMRYFSAAVSRPGRGEPRFIAMGYVDDTQFVRFDSDSACPRMEPRAPWVEQEGPEYWEEETRNTKAHAQTDRMNLQTLRGYYNQSEASSHTLQWMIGCDLGSDGRLLRGYEQYAYDGKDYLALNEDLRSWTAADTAAQISKRKCEAANVAEQRRAYLEGTCVEWLHRYLENGKEMLQRADPPKTHVTHHPVFDYEATLRCWALGFYPAEIILTWQRDGEDQTQDVELVETRPAGDGTFQKWAAVVVPSGEEQRYTCHVQHEGLPEPLMLRWKQSSLPTIPIMGIVAGLVVLAAVVTGAAVAAVLWRKKSSD

SEQ ID NO: 345497 - DNA, 1032 bp, Artificial Sequence
  derived and/or modified sequence
atgaagacccccagaatggtggtgatggcccccagaaccctgttcctgctgctgagcggcgccctgaccctgaccgagacctgggccggcagccacagcatgagatacttcagcgccgccgtgagcagacccggcagaggcgagcccagattcatcgccatgggctacgtggacgacacccagttcgtgagattcgacagcgacagcgcctgccccagaatggagcccagagccccctgggtggagcaggagggccccgagtactgggaggaggagaccagaaacaccaaggcccacgcccagaccgacagaatgaacctgcagaccctgagaggctactacaaccagagcgaggccagcagccacaccctgcagtggatgatcggctgcgacctgggcagcgacggcagactgctgagaggctacgagcagtacgcctacgacggcaaggactacctggccctgaacgaggacctgagaagctggaccgccgccgacaccgccgcccagatcagcaagagaaagtgcgaggccgccaacgtggccgagcagagaagagcctacctggagggcacctgcgtggagtggctgcacagatacctggagaacggcaaggagatgctgcagagagccgacccccccaagacccacgtgacccaccaccccgtgttcgactacgaggccaccctgagatgctgggccctgggcttctaccccgccgagatcatcctgacctggcagagagacggcgaggaccagacccaggacgtggagctggtggagaccagacccgccggcgacggcaccttccagaagtgggccgccgtggtggtgcccagcggcgaggagcagagatacacctgccacgtgcagcacgagggcctgcccgagcccctgatgctgagatggaagcagagcagcctgcccaccatccccatcatgggcatcgtggccggcctggtggtgctggccgccgtggtgaccggcgccgccgtggccgccgtgctgtggagaaagaagagcagcgactag

SEQ ID NO: 345498 - DNA, 1032 bp, Artificial Sequence
  derived and/or modified sequence
atgaaaactcctcgcatggtcgttatggcgccccggaccttattcctgctgctgagtggagcactgacactgaccgaaacctgggcagggtcccacagcatgcgctatttcagcgctgccgtcagtcggcctgggcggggagagcctagatttattgccatgggctacgtcgacgacacccagttcgtacggtttgactcggattccgcctgccctagaatggaacccagagcaccttgggtcgaacaggagggtcctgagtattgggaagaggaaaccaggaatacaaaagcacacgcccaaacagatcgaatgaacctccagactctccgcggctattataaccagagtgaggcaagctcccacacactacagtggatgatcggctgtgatctggggagcgatggacgcctgctccgcgggtatgagcagtatgcctatgatgggaaggattacctcgcactcaatgaggacctcaggtcttggacagctgcggacacggccgcccagatctccaagcgtaagtgcgaagccgcaaatgtggccgagcagaggagggcttacctcgagggcacctgcgtggaatggctgcatcgttatctggagaacggcaaagagatgctgcagcgtgcagatccacccaagacgcacgtgactcaccaccccgtcttcgactacgaggcaacgctgcgctgctgggccctcgggttttacccggctgagattattttaacgtggcagcgggatggggaagaccaaacgcaagatgtcgaactggtcgaaacgcgcccggctggcgacggcacctttcagaaatgggctgcagtcgtagtaccctccggagaggagcaacggtacacatgccacgtgcagcacgaggggttaccagagcccttgatgctgagatggaaacaatcaagtcttcctacaatcccgattatgggcatcgtcgctggattggtcgtccttgccgcggtggttaccggagccgcagtggccgccgtgctgtggaggaagaagagctctgattag

SEQ ID NO: 345499 - DNA, 1032 bp, Artificial Sequence
  derived and/or modified sequence
atgaagacgccacgcatggtggttatggccccgcgtaccctatttctattactgtcaggtgcccttacgttgacggaaacttgggccggatcccatagcatgagatacttctctgctgcagtgagcagacctgggagaggcgaacccagatttatcgccatgggttatgtggacgacacgcagtttgtgagattcgatagtgatagtgcttgccctcggatggaacctcgcgctccgtgggtggaacaggagggacccgagtactgggaggaagaaaccagaaatacaaaggctcatgctcagacggacagaatgaacctgcagactctgcggggttactacaaccagtcagaggcgtcgagtcacacactgcagtggatgattggctgtgacctgggcagtgatggcagactcctgcgcggctatgagcagtatgcatacgacggcaaggattacctggccctgaacgaggatcttcggtcatggacagccgcagacaccgcggcccagatctctaagcggaaatgcgaagccgctaacgtggcggaacagaggcgcgcatatctggaaggaacctgtgtggagtggttgcatcggtatttggagaatggcaaagagatgttgcaaagagccgatcccccgaagactcatgtgactcaccacccggtgtttgactacgaggctaccctgcggtgttgggcactcggcttctaccccgctgaaatcatactgacttggcagagagacggagaagaccagacccaggatgtggagctcgtggagaccagacccgctggcgatggtacatttcagaaatgggcggctgtcgttgtgcctagcggtgaggagcagagatatacatgccatgtgcagcacgagggattgcctgagcctctgatgctgaggtggaagcagtcgtctctacctaccatcccgattatgggcatcgtagctggccttgtcgtcttagctgcagtagtcactggggcagccgtcgccgcagtactgtggaggaaaaagtcttcggactag

SEQ ID NO: 345500 - DNA, 1032 bp, Artificial Sequence
  derived and/or modified sequence
atgaaaacaccgaggatggttgtgatggccccgaggaccctgttcttgctgttgtcaggagcactgacattgacagagacatgggctggatctcatagtatgcggtacttttctgctgctgtcagccgtccaggacgaggggagccccggttcatcgccatggggtacgttgacgatacacagtttgtgcgattcgactctgacagtgcatgcccccgaatggagccgcgcgcgccttgggtggagcaggaggggcccgaatactgggaagaggagaccaggaataccaaggcccacgcccagactgaccgcatgaacttacagactttgcggggctactacaaccaaagtgaggcctctagtcatacacttcagtggatgatcggatgtgacctgggatccgacggaaggctgttgagaggctatgaacaatacgcatacgacggcaaggattatttagctctgaatgaagacctcagatcatggaccgccgccgatacggccgctcagatcagcaagcgtaagtgcgaagccgcgaatgtcgctgaacagcggagggcctatctggaggggacttgcgtagagtggctccatcgctacctggagaatgggaaagaaatgctgcagcgggccgatccaccaaagactcatgtgacacatcacccagtctttgattacgaggccacactgcgttgctgggccctgggattttacccagccgagatcatattgacatggcagcgcgatggcgaagaccagacacaagatgtcgagttggttgagacgagacccgccggcgacggcactttccagaaatgggccgcagtggtagtgccttctggagaggaacagaggtacacctgccacgtgcagcacgaggggctgccggaaccactcatgctccgctggaagcaaagtagcctccctacaatacctatcatgggcatcgtcgcaggtctggtcgtgctggccgcagtggtaactggagccgcagtggcggctgtgctgtggaggaaaaaatctagcgattag

SEQ ID NO: 345501 - DNA, 1032 bp, Artificial Sequence
  derived and/or modified sequence
atgaagacaccgcgaatggtggttatggctccaagaaccttgttcctgttgttatccggcgccctgacgttaaccgagacctgggctggcagtcacagcatgaggtacttctccgccgccgtgtcccgacccggcaggggagaacctagatttatcgcgatgggttatgtggatgacactcaatttgttcgatttgacagcgattcagcatgtccccggatggaaccaagagccccgtgggtggagcaggaaggccccgaatactgggaggaagagactcgaaataccaaggctcacgcacaaacagacagaatgaatctgcaaacgctccgtggctactacaatcagtccgaggcatcatctcacacgttgcaatggatgatcgggtgtgacctggggagcgatggtaggcttcttaggggctatgagcagtatgcctacgacgggaaggattacctagcattgaacgaggacttgcgctcctggaccgctgcagacaccgccgcccagattagcaagaggaaatgtgaagccgccaatgtggccgagcagcggagagcttatttggaaggaacctgtgtggagtggctgcacaggtacctcgagaacggcaaggaaatgctgcagcgggcggaccccccgaagacacacgtcacacaccaccctgtgtttgactatgaagctaccctgcggtgttgggccttaggtttctatcctgcagagatcatcctgacctggcagcgtgatggcgaagaccagacccaggacgtcgagcttgtcgagaccaggcccgcgggggacgggacttttcagaaatgggccgctgtagtcgtaccgagtggtgaggaacagcgctatacatgccatgtgcagcacgaagggttgcctgaacccctgatgctgcgttggaaacagagcagcctgcccacgatccctatcatgggcatagttgcagggctcgtggtgctcgctgcagtcgtgacaggcgccgccgtcgcagccgtgctttggcggaagaaatcttccgattag

SEQ ID NO: 345502 - DNA, 1032 bp, Artificial Sequence
  derived and/or modified sequence
atgaaaacccctcgcatggtggtaatggcacccagaaccttattcttactgctgtccggagccctaacactgaccgaaacatgggccggaagccacagtatgcgttatttctcggcagctgtctcaaggcccggacgtggtgaaccacggtttatagccatgggatacgtggacgatactcagttcgtgaggtttgacagcgattccgcttgccctagaatggaaccgagggctccttgggtagagcaggagggacccgaatactgggaagaagaaactcggaacacaaaggcacatgcacagactgacagaatgaacctacaaacactcaggggttattacaaccagagcgaagcatccagccatacgctgcagtggatgattggctgcgatctagggtctgacggcaggctactccggggctacgagcagtacgcatacgacggaaaagactatttagctctgaatgaagatctccggtcttggactgccgccgatacagccgcgcaaatcagcaagcgcaagtgcgaggccgccaacgtagctgagcagagacgcgcctatctcgaaggcacctgcgtggagtggctgcaccggtatttagaaaacggcaaggagatgctgcagcgagccgatccgccgaagactcatgtgacacaccatccagtgtttgattatgaagccacgctccggtgctgggccctaggattctacccggctgaaatcatcctaacctggcagcgcgacggggaagatcagacccaagacgtggagttggttgagactagacctgcaggagatgggacctttcaaaaatgggccgccgtggtggtgcccagtggggaggagcagagatacacatgtcacgtccagcacgaagggctgcctgagccattgatgttgcgttggaagcagtcaagtctgcctaccatccctattatgggtattgtcgccgggttggtcgtcctggccgccgtggtgacaggtgccgcagtggcggccgtcctctggcgtaagaagtcttcggattag

SEQ ID NO: 345503 - DNA, 1032 bp, Artificial Sequence
  derived and/or modified sequence
atgaaaaccccgcgaatggttgtcatggctccccggactctcttcctcctcctgtcaggtgctcttaccctgaccgaaacctgggcgggaagccactccatgcgttacttcagtgccgccgtttccaggcccggtagaggcgaacctcgtttcatcgccatggggtacgtggacgatacccaatttgtcaggtttgactcagattccgcctgccctaggatggaacctagggctccatgggtagagcaggaaggacctgagtactgggaagaagaaacccgcaacaccaaggctcatgcccagaccgatcgtatgaatcttcagactctgcggggttactacaaccagagtgaagcgtccagtcacacactgcagtggatgatcggatgtgacctggggagcgatggcaggctgctccgaggatacgagcagtacgcctatgacgggaaagactacctagccctcaacgaagatctgagaagttggacggcagccgatacagccgcccagatatccaagcggaaatgtgaggcagctaacgtagcggaacagcgccgagcttacctcgaaggcacctgtgtggagtggcttcaccgctatctcgaaaatgggaaggaaatgcttcagagagccgaccctccaaagacccacgttacacaccaccccgtttttgattacgaggctactctccgctgctgggctctgggcttttatcccgcagaaataatcctgacctggcagagggacggcgaggatcagacccaggatgttgagctggtggagacaagaccagctggagatgggacatttcagaagtgggcagccgttgtcgtgccgagcggggaagaacaacgctacacatgccatgtgcagcacgaagggctccctgagcctttaatgctccgatggaaacagagtagcctgccgacgatcccaatcatgggtattgtcgcaggcctagtggtgttggcagcagtcgtgacaggcgcggccgtggccgctgtgctttggcggaaaaagtcatccgactag

SEQ ID NO: 345504 - DNA, 1032 bp, Artificial Sequence
  derived and/or modified sequence
atgaagactccgcgtatggtggtcatggcacccaggaccttgttcctcctgttgagcggcgcattaacactgaccgagacctgggccgggtcccactctatgagatattttagtgcggccgtcagtaggccaggccggggcgaaccacgatttatagccatggggtatgtggatgatacgcagttcgtccggtttgattccgactctgcttgcccgcgcatggaacccagggctccctgggtcgaacaggagggaccagaatactgggaagaagagacacgaaacacaaaggctcacgcacaaacagaccgcatgaaccttcagacgctgagaggctactacaaccagagcgaggccagttcccacactcttcagtggatgatcgggtgtgatctcggtagcgatggtaggctgttacgtgggtatgagcaatatgcttatgacggtaaggactatctggccctcaacgaagatctccgaagctggacggccgccgatacggccgctcaaataagtaagcggaagtgtgaggctgcaaatgtcgccgagcaacggcgagcctatcttgaagggacatgtgtggagtggctgcacagataccttgagaacggcaaggagatgctccagagggccgaccccccgaagactcatgtgacccatcaccccgttttcgactatgaagcgaccctgcgctgctgggccttaggtttttaccccgcggaaatcatactcacgtggcagcgggatggggaagaccagactcaggatgtagagttagtggaaactcgccccgcaggagacggaacttttcagaaatgggctgccgttgtcgtaccaagtggtgaggaacaacgatatacatgccatgtgcagcacgagggtttgcccgagcctttgatgctgcgctggaaacagtcctcgctgcctactatacctataatgggtattgttgccgggttggtcgtgcttgcagctgtggttactggtgcagccgttgctgctgtcctctggcgaaagaagtccagtgactag

SEQ ID NO: 345505 - DNA, 1427 bp, Artificial Sequence
  derived and/or modified sequence
actcattctccccagacgccaaggatggtggtcatggcgccccgaaccctcttcctgctgctctcgggggccctgaccctgaccgagacctgggcgggctcccactccatgaggtatttcagcgccgccgtgtcccggcccggccgcggggagccccgcttcatcgccatgggctacgtggacgacacgcagttcgtgcggttcgacagcgactcggcgtgtccgaggatggagccgcgggcgccgtgggtggagcaggaggggccggagtattgggaagaggagacacggaacaccaaggcccacgcacagactgacagaatgaacctgcagaccctgcgcggctactacaaccagagcgaggccagttctcacaccctccagtggatgattggctgcgacctggggtccgacggacgcctcctccgcgggtatgaacagtatgcctacgatggcaaggattacctcgccctgaacgaggacctgcgctcctggaccgcagcggacactgcggctcagatctccaagcgcaagtgtgaggcggccaatgtggctgaacaaaggagagcctacctggagggcacgtgcgtggagtggctccacagatacctggagaacgggaaggagatgctgcagcgcgcggacccccccaagacacacgtgacccaccaccctgtctttgactatgaggccaccctgaggtgctgggccctgggcttctaccctgcggagatcatactgacctggcagcgggatggggaggaccagacccaggacgtggagctcgtggagaccaggcctgcaggggatggaaccttccagaagtgggcagctgtggtggtgccttctggagaggagcagagatacacgtgccatgtgcagcatgaggggctgccggagcccctcatgctgagatggaagcagtcttccctgcccaccatccccatcatgggtatcgttgctggcctggttgtccttgcagctgtagtcactggagctgcggtcgctgctgtgctgtggagaaagaagagctcagattgaaaaggagggagctactctcaggctgcaatgtgaaacagctgccctgtgtgggactgagtggcaagtccctttgtgacttcaagaaccctgactcctctttgtgcagagaccagcccacccctgtgcccaccatgaccctcttcctcatgctgaactgcattccttccccaatcacctttcctgttccagaaaaggggctgggatgtctccgtctctgtctcaaatttgtggtccactgagctataacttacttctgtattaaaattagaatctgagtataaatttactttttcaaattatttccaagagagattgatgggttaattaaaggagaagattcctgaaatttgagagacaaaataaatggaagacatgagaactttcca

SEQ ID NO: 345506 - DNA, 1490 bp, Artificial Sequence
  derived and/or modified sequence
atatagtaacatagtgtggtactttgtcttgaggagatgtcctggactcacacggaaacttagggctacggaatgaagacgccaaggatggtggtcatggcgccccgaaccctcttcctgctgctctcgggggccctgaccctgaccgagacctgggcgggctcccactccatgaggtatttcagcgccgccgtgtcccggcccggccgcggggagccccgcttcatcgccatgggctacgtggacgacacgcagttcgtgcggttcgacagcgactcggcgtgtccgaggatggagccgcgggcgccgtgggtggagcaggaggggccggagtattgggaagaggagacacggaacaccaaggcccacgcacagactgacagaatgaacctgcagaccctgcgcggctactacaaccagagcgaggccagttctcacaccctccagtggatgattggctgcgacctggggtccgacggacgcctcctccgcgggtatgaacagtatgcctacgatggcaaggattacctcgccctgaacgaggacctgcgctcctggaccgcagcggacactgcggctcagatctccaagcgcaagtgtgaggcggccaatgtggctgaacaaaggagagcctacctggagggcacgtgcgtggagtggctccacagatacctggagaacgggaaggagatgctgcagcgcgcggacccccccaagacacacgtgacccaccaccctgtctttgactatgaggccaccctgaggtgctgggccctgggcttctaccctgcggagatcatactgacctggcagcgggatggggaggaccagacccaggacgtggagctcgtggagaccaggcctgcaggggatggaaccttccagaagtgggcagctgtggtggtgccttctggagaggagcagagatacacgtgccatgtgcagcatgaggggctgccggagcccctcatgctgagatggaagcagtcttccctgcccaccatccccatcatgggtatcgttgctggcctggttgtccttgcagctgtagtcactggagctgcggtcgctgctgtgctgtggagaaagaagagctcagattgaaaaggagggagctactctcaggctgcaatgtgaaacagctgccctgtgtgggactgagtggcaagtccctttgtgacttcaagaaccctgactcctctttgtgcagagaccagcccacccctgtgcccaccatgaccctcttcctcatgctgaactgcattccttccccaatcacctttcctgttccagaaaaggggctgggatgtctccgtctctgtctcaaatttgtggtccactgagctataacttacttctgtattaaaattagaatctgagtataaatttactttttcaaattatttccaagagagattgatgggttaattaaaggagaagattcctgaaatttgagagacaaaataaatggaagacatgagaactttcca

SEQ ID NO: 345507 - DNA, 1443 bp, Artificial Sequence
  derived and/or modified sequence
actcattctccccagacgccaaggatggtggtcatggcaccccgaaccctcttcctgctactctcgggggccctgaccctgaccgagacctgggcgggctcccactccatgaggtatttcagcgccgccgtgtcccggcccggccgcggggagccccgcttcatcgccatgggctacgtggacgacacgcagttcgtgcggttcgacagcgactcggcgtgtccgaggatggagccgcgggcgccgtgggtggagcaggaggggccagagtattgggaagaggagacacggaacaccaaggcccacgcacagactgacagaatgaacctgcagaccctgcgcggctactacaaccagagcgaggccagttctcataccctccagtggatgattggctgcgacctggggtccgacggacgcctcctccgcgggtatgaacagtatgcctacgatggcaaggattacctcgccctgaacgaggacctgcgctcctggaccgcagcggacactgcggctcagatctccaagcgcaagtgtgaggcggccaatgtggctgaacaaaggagagcctacctggagggcacgtgcgtggagtggctccacagatacctggagaacgggaaggagatgctgcagcgcgcggacccccccaagacacacgtgacccaccaccctgtctttgactatgaggccaccctgaggtgctgggccctgggcttctaccctgcggagatcatactgacctggcagcgggatggggaggaccagacccaggacgtggagctcgtggagaccaggcctgcaggggatggaaccttccagaagtgggcagctgtggtggtgccttctggagaggagcagagatacacgtgccatgtgcagcatgaggggctgccggagcccctcatgctgagatggaagcagtcttccctgcccaccatccccatcatgggtatcgttgctggtctggttgtccttgcagctgtagtcactggagctgcggtcgctgctgtgctgtggaggaagaagagctcagattgaaaaggagggagctactctcaggctgcaatgtgaaacagctgccctgtgtgggactgagtggcaagatttgttcatgccttccctttgtgacttcaagaaccctgacttctctttctgcagagaccagcccacccctgtgcccaccatgaccctcttcctcatgctgaactgcattccttccccaatcacctttcctgttccagaaaaggggctgggatgtctccgtctctgtctcaaatttgtggtgcactgagctataacttacttctgtattaaaattagaatctgagtataaatttagtttttcaaattatttccaagagagattgatgggttaattaaaggagaagattcctgaaatttgagagacaaaataaatggaagacatgagaactttccaca

SEQ ID NO: 345508 - DNA, 1497 bp, Artificial Sequence
  derived and/or modified sequence
atatagtaacatagtgtggtactttgtcttgaggagatgtcctggactcacacggaaacttagggctacggaatgaagacgccaaggatggtggtcatggcaccccgaaccctcttcctgctactctcgggggccctgaccctgaccgagacctgggcgggctcccactccatgaggtatttcagcgccgccgtgtcccggcccggccgcggggagccccgcttcatcgccatgggctacgtggacgacacgcagttcgtgcggttcgacagcgactcggcgtgtccgaggatggagccgcgggcgccgtgggtggagcaggaggggccagagtattgggaagaggagacacggaacaccaaggcccacgcacagactgacagaatgaacctgcagaccctgcgcggctactacaaccagagcgaggccagttctcataccctccagtggatgattggctgcgacctggggtccgacggacgcctcctccgcgggtatgaacagtatgcctacgatggcaaggattacctcgccctgaacgaggacctgcgctcctggaccgcagcggacactgcggctcagatctccaagcgcaagtgtgaggcggccaatgtggctgaacaaaggagagcctacctggagggcacgtgcgtggagtggctccacagatacctggagaacgggaaggagatgctgcagcgcgcggacccccccaagacacacgtgacccaccaccctgtctttgactatgaggccaccctgaggtgctgggccctgggcttctaccctgcggagatcatactgacctggcagcgggatggggaggaccagacccaggacgtggagctcgtggagaccaggcctgcaggggatggaaccttccagaagtgggcagctgtggtggtgccttctggagaggagcagagatacacgtgccatgtgcagcatgaggggctgccggagcccctcatgctgagatggaagcagtcttccctgcccaccatccccatcatgggtatcgttgctggtctggttgtccttgcagctgtagtcactggagctgcggtcgctgctgtgctgtggaggaagaagagctcagattgaaaaggagggagctactctcaggctgcaatgtgaaacagctgccctgtgtgggactgagtggcaagatttgttcatgccttccctttgtgacttcaagaaccctgacttctctttctgcagagaccagcccacccctgtgcccaccatgaccctcttcctcatgctgaactgcattccttccccaatcacctttcctgttccagaaaaggggctgggatgtctccgtctctgtctcaaatttgtggtgcactgagctataacttacttctgtattaaaattagaatctgagtataaatttagtttttcaaattatttccaagagagattgatgggttaattaaaggagaagattcctgaaatttgagagacaaaataaatggaagacatgagaa

SEQ ID NO: 345509 - DNA, 1506 bp, Artificial Sequence
  derived and/or modified sequence
atatagtaacatagtgtggtactttgtcttgaggagatgtcctggactcacacggaaacttagggctacggaatgaagacgccaaggatggtggtcatggcaccccgaaccctcttcctgctactctcgggggccctgaccctgaccgagacctgggcgggctcccactccatgaggtatttcagcgccgccgtgtcccggcccggccgcggggagccccgcttcatcgccatgggctacgtggacgacacgcagttcgtgcggttcgacagcgactcggcgtgtccgaggatggagccgcgggcgccgtgggtggagcaggaggggccagagtattgggaagaggagacacggaacaccaaggcccacgcacagactgacagaatgaacctgcagaccctgcgcggctactacaaccagagcgaggccagttctcataccctccagtggatgattggctgcgacctggggtccgacggacgcctcctccgcgggtatgaacagtatgcctacgatggcaaggattacctcgccctgaacgaggacctgcgctcctggaccgcagcggacactgcggctcagatctccaagcgcaagtgtgaggcggccaatgtggctgaacaaaggagagcctacctggagggcacgtgcgtggagtggctccacagatacctggagaacgggaaggagatgctgcagcgcgcggacccccccaagacacacgtgacccaccaccctgtctttgactatgaggccaccctgaggtgctgggccctgggcttctaccctgcggagatcatactgacctggcagcgggatggggaggaccagacccaggacgtggagctcgtggagaccaggcctgcaggggatggaaccttccagaagtgggcagctgtggtggtgccttctggagaggagcagagatacacgtgccatgtgcagcatgaggggctgccggagcccctcatgctgagatggaagcagtcttccctgcccaccatccccatcatgggtatcgttgctggtctggttgtccttgcagctgtagtcactggagctgcggtcgctgctgtgctgtggaggaagaagagctcagattgaaaaggagggagctactctcaggctgcaatgtgaaacagctgccctgtgtgggactgagtggcaagatttgttcatgccttccctttgtgacttcaagaaccctgacttctctttctgcagagaccagcccacccctgtgcccaccatgaccctcttcctcatgctgaactgcattccttccccaatcacctttcctgttccagaaaaggggctgggatgtctccgtctctgtctcaaatttgtggtgcactgagctataacttacttctgtattaaaattagaatctgagtataaatttagtttttcaaattatttccaagagagattgatgggttaattaaaggagaagattcctgaaatttgagagacaaaataaatggaagacatgagaactttccaca

SEQ ID NO: 345510 - DNA, 1490 bp, Artificial Sequence
  derived and/or modified sequence
atatagtaacatagtgtggtactttgtcttgaggagatgtcctggactcacacggaaacttagggctacggaatgaagacgccaaggatggtggtcatggcgccccgaaccctcttcctgctgctctcgggggccctgaccctgaccgagacctgggcgggctcccactccatgaggtatttcagcgccgccgtgtcccggcccggccgcggggagccccgcttcatcgccatgggctacgtggacgacacgcagttcgtgcggttcgacagcgactcggcgtgtccgaggatggagccgcgggcgccgtgggtggagcaggaggggccggagtattgggaagaggagacacggaacaccaaggcccacgcacagactgacagaatgaacctgcagaccctgcgcggctactacaaccagagcgaggccagttctcacaccctccagtggatgattggctgcgacctggggtccgacggacgcctcctccgcgggtatgaacagtatgcctacgatggcaaggattacctcgccctgaacgaggacctgcgctcctggaccgcagcggacactgcggctcagatctccaagcgcaagtgtgaggcggccaatgtggctgaacaaaggagagcctacctggagggcacgtgcgtggagtggctccacagatacctggagaacgggaaggagatgctgcagcgcgcggacccccccaagacacacgtgacccaccaccctgtctttgactatgaggccaccctgaggtgctgggccctgggcttctaccctgcggagatcatactgacctggcagcgggatggggaggaccagacccaggacgtggagctcgtggagaccaggcctgcaggggatggaaccttccagaagtgggcagctgtggtggtgccttctggagaggagcagagatacacgtgccatgtgcagcatgaggggctgccggagcccctcatgctgagatggaagcagtcttccctgcccaccatccccatcatgggtatcgttgctggcctggttgtccttgcagctgtagtcactggagctgcggtcgctgctgtgctgtggagaaagaagagctcagattgaaaaggagggagctactctcaggctgcaatgtgaaacagctgccctgtgtgggactgagtggcaagtccctttgtgacttcaagaaccctgacttctctttgtgcagagaccagcccacccctgtgcccaccatgaccctcttcctcatgctgaactgcattccttccccaatcacctttcctgttccagaaaaggggctgggatgtctccgtctctgtctcaaatttgtggtccactgagctataacttacttctgtattaaaattagaatctgagtgtaaatttactttttcaaattatttccaagagagattgatgggttaattaaaggagaagattcctgaaatttgagagacaaaataaatggaagacatgagaactttcca

SEQ ID NO: 345511 - DNA, 1490 bp, Artificial Sequence
  derived and/or modified sequence
atatagtaacatagtgtggtactttgtcttgaggagatgtcctggactcacacggaaacttagggctacggaatgaagacgccaaggatggtggtcatggcgccccgaaccctcttcctgctgctctcgggggccctgaccctgaccgagacctgggcgggctcccactccatgaggtatttcagcgccgccgtgtcccggcccggccgcggggagccccgcttcatcgccatgggctacgtggacgacacgcagttcgtgcggttcgacagcgactcggcgtgtccgaggatggagccgcgggcgccgtgggtggagcaggaggggccggagtattgggaagaggagacacggaacaccaaggcccacgcacagactgacagaatgaacctgcagaccctgcgcggctactacaaccagagcgaggccagttctcacaccctccagtggatgattggctgcgacctggggtccgacggacgcctcctccgcgggtatgaacagtatgcctacgatggcaaggattacctcgccctgaacgaggacctgcgctcctggaccgcagcggacactgcggctcagatctccaagcgcaagtgtgaggcggccaatgtggctgaacaaaggagagcctacctggagggcacgtgcgtggagtggctccacagatacctggagaacgggaaggagatgctgcagcgcgcggacccccccaagacacacgtgacccaccaccctgtctttgactatgaggccaccctgaggtgctgggccctgggcttctaccctgcggagatcatactgacctggcagcgggatggggaggaccagacccaggacgtggagctcgtggagaccaggcctgcaggggatggaaccttccagaagtgggcagctgtggtggtgccttctggagaggagcagagatacacgtgccatgtgcagcatgaggggctgccggagcccctcatgctgagatggaagcagtcttccctgcccaccatccccatcatgggtatcgttgctggcctggttgtccttgcagctgtagtcactggagctgcggtcgctgctgtgctgtggagaaagaagagctcagattgaaaaggagggagctactctcaggctgcaatgtgaaacagctgccctgtgtgggactgagtggcaagtccctttgtgacttcaagaaccctgacttctctttgtgcagagaccagcccacccctgtgcccaccatgaccctcttcctcatgctgaactgcattccttccccaatcacctttcctgttccagaaaaggggctgggatgtctccgtctctgtctcaaatttgtggtccactgagctataacttacttctgtattaaaattagaatctgagtataaatttactttttcaaattatttccaagagagattgataggttaattaaaggagaagattcctgaaatttgagagacaaaataaatggaagacatgagaactttcca

SEQ ID NO: 345512 - DNA, 1441 bp, Artificial Sequence
  derived and/or modified sequence
actcattctccccagacgccaaggatggtggtcatggcaccccgaaccctcttcctgctactctcgggggccctgaccctgaccgagacctgggcgggctcccactccatgaggtatttcagcgccgccgtgtcccggcccggccgcggggagccccgcttcatcgccatgggctacgtggacgacacgcagttcgtgcggttcgacagcgactcggcttgtccgaggatggagccgcgggcgccgtgggtggagcaggaggggccagagtattgggaagaggagacacggaacaccaaggcccacgcacagactgacagaatgaacctgcagaccctgcgcggctactacaaccagagcgaggccagttctcataccctccagtggatgattggctgcgacctggggtccgacggacgcctcctccgcgggtatgaacagtatgcctacgatggcaaggattacctcgccctgaacgaggacctgcgctcctggaccgcagcggacactgcggctcagatctccaagcgcaagtgtgaggcggccaatgtggctgaacaaaggagagcctacctggagggcacgtgcgtggagtggctccacagatacctggagaacgggaaggagatgctgcagcgcgcggacccccccaagacacacgtgacccaccaccctgtctttgactatgaggccaccctgaggtgctgggccctgggcttctaccctgcggagatcatactgacctggcagcgggatggggaggaccagacccaggacgtggagctcgtggagaccaggcctgcaggggatggaaccttccagaagtgggcagctgtggtggtgccttctggagaggagcagagatacacgtgccatgtgcagcatgaggggctgccggagcccctcatgctgagatggaagcagtcttccctgcccaccatccccatcatgggtatcgttgctggcctggttgtccttgcagctgtagtcactggagctgcggtcgctgctgtgctgtggaggaagaagagctcagattgaaaaggagggagctactctcaggctgcaatgtgaaacagctgccctgtgtgggactgagtggcaagatttgttcatgccttccctttgtgacttcaagaaccctgacttctctttctgcagagaccagcccacccctgtgcccaccatgaccctcttcctcatgctgaactgcattccttccccaatcacctttcctgttccagaaaaggggctgggatgtctccgtctctgtctcaaatttgtggtgcactgagctataacttacttctgtattaaaattagaatctgagtataaatttagtttttcaaattatttccaagagagattgatgggttaattaaaggagaagattcctgaaatttgagagacaaaataaatggaagacatgagaactttcca

SEQ ID NO: 345513 - DNA, 1427 bp, Artificial Sequence
  derived and/or modified sequence
actcattctccccagacgccaaggatggtggtcatggcgccccgaaccctcttcctgctgctctcgggggccctgaccctgaccgagacctgggcgggctcccactccatgaggtatttcagcgccgccgtgtcccggcccggccgcggggagccccgcttcatcgccatgggctacgtggacgacacgcagttcgtgcggttcgacagcgactcggcgtgtccgaggatggagccgcgggcgccgtgggtggagcaggaggggccggagtattgggaagaggagacacggaacaccaaggcccacgcacagactgacagaatgaacctgcagaccctgcgcggctactacaaccagagcgaggccagttctcacaccctccagtggatgattggctgcgacctggggtccgacggacgcctcctccgcgggtatgaacagtatgcctacgatggcaaggattacctcgccctgaacgaggacctgcgctcctggaccgcagcggacactgcggctcagatctccaagcgcaagtgtgaggcggccaatgtggctgaacaaaggagagcctacctggagggcacgtgcgtggagtggctccacagatacctggagaacgggaaggagatgctgcagcgcgcggacccccccaagacacacgtgacccaccaccctgtctttgactatgaggccaccctgaggtgctgggccctgggcttctaccctgcggagatcatactgacctggcagcgggatggggaggaccagacccaggacgtggagctcgtggagaccaggcctgcaggggatggaaccttccagaagtgggcagctgtggtggtgccttctggagaggagcagagatacacgtgccatgtgcagcatgaggggctgccggagcccctcatgctgagatggaagcagtcttccctgcccaccatccccatcatgggtatcgttgctggcctggttgtccttgcagctgtagtcactggagctgcggtcgctgctgtgctgtggagaaagaagagctcagattgaaaaggagggagctactctcaggctgcaatgtgaaacagctgccctgtgtgggactgagtggcaagtccctttgtgacttcaagaaccctgacttctctttgtgcagagaccagcccacccctgtgcccaccatgaccctcttcctcatgctgaactgcattccttccccaatcacctttcctgttccagaaaaggggctgggatgtctccgtctctgtctcaaatttgtggtccactgagctataacttacttctgtattaaaattagaatctgagtgtaaatttactttttcaaattatttccaagagagattgatgggttaattaaaggagaagattcctgaaatttgagagacaaaataaatggaagacatgagaactttcca

SEQ ID NO: 345514 - DNA, 1578 bp, Artificial Sequence
  derived and/or modified sequence
agtgtggtactttgtcttgaggagatgtcctggactcacacggaaacttagggctacggaatgaagttctcactcccattaggtgacaggtttttagagaagccaatcagcgtcgccgcggtcctggttctaaagtcctcgctcacccacccggactcattctccccagacgccaaggatggtggtcatggcgccccgaaccctcttcctgctgctctcgggggccctgaccctgaccgagacctgggcgggctcccactccatgaggtatttcagcgccgccgtgtcccggcccggccgcggggagccccgcttcatcgccatgggctacgtggacgacacgcagttcgtgcggttcgacagcgactcggcgtgtccgaggatggagccgcgggcgccgtgggtggagcaggaggggccggagtattgggaagaggagacacggaacaccaaggcccacgcacagactgacagaatgaacctgcagaccctgcgcggctactacaaccagagcgaggccagttctcacaccctccagtggatgattggctgcgacctggggtccgacggacgcctcctccgcgggtatgaacagtatgcctacgatggcaaggattacctcgccctgaacgaggacctgcgctcctggaccgcagcggacactgcggctcagatctccaagcgcaagtgtgaggcggccaatgtggctgaacaaaggagagcctacctggagggcacgtgcgtggagtggctccacagatacctggagaacgggaaggagatgctgcagcgcgcggacccccccaagacacacgtgacccaccaccctgtctttgactatgaggccaccctgaggtgctgggccctgggcttctaccctgcggagatcatactgacctggcagcgggatggggaggaccagacccaggacgtggagctcgtggagaccaggcctgcaggggatggaaccttccagaagtgggcagctgtggtggtgccttctggagaggagcagagatacacgtgccatgtgcagcatgaggggctgccggagcccctcatgctgagatggaagcagtcttccctgcccaccatccccatcatgggtatcgttgctggcctggttgtccttgcagctgtagtcactggagctgcggtcgctgctgtgctgtggagaaagaagagctcagattgaaaaggagggagctactctcaggctgcaatgtgaaacagctgccctgtgtgggactgagtggcaagtccctttgtgacttcaagaaccctgactcctctttgtgcagagaccagcccacccctgtgcccaccatgaccctcttcctcatgctgaactgcattccttccccaatcacctttcctgttccagaaaaggggctgggatgtctccgtctctgtctcaaatttgtggtccactgagctataacttacttctgtattaaaattagaatctgagtataaatttactttttcaaattatttccaagagagattgatgggttaattaaaggagaagattcctgaaatttgagagacaaaataaatggaagacatgagaacttt

SEQ ID NO: 345515 - DNA, 1427 bp, Artificial Sequence
  derived and/or modified sequence
actcattctccccagacgccaaggatggtggtcatggcgccccgaaccctcttcctgctgctctcgggggccctgaccctgaccgagacctgggcgggctcccactccatgaggtatttcagcgccgccgtgtcccggcccggccgcggggagccccgcttcatcgccatgggctacgtggacgacacgcagttcgtgcggttcgacagcgactcggcgtgtccgaggatggagccgcgggcgccgtgggtggagcaggaggggccggagtattgggaagaggagacacggaacaccaaggcccacgcacagactgacagaatgaacctgcagaccctgcgcggctactacaaccagagcgaggccagttctcacaccctccagtggatgattggctgcgacctggggtccgacggacgcctcctccgcgggtatgaacagtatgcctacgatggcaaggattacctcgccctgaacgaggacctgcgctcctggaccgcagcggacactgcggctcagatctccaagcgcaagtgtgaggcggccaatgtggctgaacaaaggagagcctacctggagggcacgtgcgtggagtggctccacagatacctggagaacgggaaggagatgctgcagcgcgcggacccccccaagacacacgtgacccaccaccctgtctttgactatgaggccaccctgaggtgctgggccctgggcttctaccctgcggagatcatactgacctggcagcgggatggggaggaccagacccaggacgtggagctcgtggagaccaggcctgcaggggatggaaccttccagaagtgggcagctgtggtggtgccttctggagaggagcagagatacacgtgccatgtgcagcatgaggggctgccggagcccctcatgctgagatggaagcagtcttccctgcccaccatccccatcatgggtatcgttgctggcctggttgtccttgcagctgtagtcactggagctgcggtcgctgctgtgctgtggagaaagaagagctcagattgaaaaggagggagctactctcaggctgcaatgtgaaacagctgccctgtgtgggactgagtggcaagtccctttgtgacttcaagaaccctgacttctctttgtgcagagaccagcccacccctgtgcccaccatgaccctcttcctcatgctgaactgcattccttccccaatcacctttcctgttccagaaaaggggctgggatgtctccgtctctgtctcaaatttgtggtccactgagctataacttacttctgtattaaaattagaatctgagtataaatttactttttcaaattatttccaagagagattgataggttaattaaaggagaagattcctgaaatttgagagacaaaataaatggaagacatgagaactttcca

SEQ ID NO: 345516 - DNA, 1504 bp, Artificial Sequence
  derived and/or modified sequence
atatagtaacatagtgtggtactttgtcttgaggagatgtcctggactcacacggaaacttagggctacggaatgaagacgccaaggatggtggtcatggcaccccgaaccctcttcctgctactctcgggggccctgaccctgaccgagacctgggcgggctcccactccatgaggtatttcagcgccgccgtgtcccggcccggccgcggggagccccgcttcatcgccatgggctacgtggacgacacgcagttcgtgcggttcgacagcgactcggcttgtccgaggatggagccgcgggcgccgtgggtggagcaggaggggccagagtattgggaagaggagacacggaacaccaaggcccacgcacagactgacagaatgaacctgcagaccctgcgcggctactacaaccagagcgaggccagttctcataccctccagtggatgattggctgcgacctggggtccgacggacgcctcctccgcgggtatgaacagtatgcctacgatggcaaggattacctcgccctgaacgaggacctgcgctcctggaccgcagcggacactgcggctcagatctccaagcgcaagtgtgaggcggccaatgtggctgaacaaaggagagcctacctggagggcacgtgcgtggagtggctccacagatacctggagaacgggaaggagatgctgcagcgcgcggacccccccaagacacacgtgacccaccaccctgtctttgactatgaggccaccctgaggtgctgggccctgggcttctaccctgcggagatcatactgacctggcagcgggatggggaggaccagacccaggacgtggagctcgtggagaccaggcctgcaggggatggaaccttccagaagtgggcagctgtggtggtgccttctggagaggagcagagatacacgtgccatgtgcagcatgaggggctgccggagcccctcatgctgagatggaagcagtcttccctgcccaccatccccatcatgggtatcgttgctggcctggttgtccttgcagctgtagtcactggagctgcggtcgctgctgtgctgtggaggaagaagagctcagattgaaaaggagggagctactctcaggctgcaatgtgaaacagctgccctgtgtgggactgagtggcaagatttgttcatgccttccctttgtgacttcaagaaccctgacttctctttctgcagagaccagcccacccctgtgcccaccatgaccctcttcctcatgctgaactgcattccttccccaatcacctttcctgttccagaaaaggggctgggatgtctccgtctctgtctcaaatttgtggtgcactgagctataacttacttctgtattaaaattagaatctgagtataaatttagtttttcaaattatttccaagagagattgatgggttaattaaaggagaagattcctgaaatttgagagacaaaataaatggaagacatgagaactttcca

SEQ ID NO: 345517 - DNA, 1434 bp, Artificial Sequence
  derived and/or modified sequence
actcattctccccagacgccaaggatggtggtcatggcaccccgaaccctcttcctgctactctcgggggccctgaccctgaccgagacctgggcgggctcccactccatgaggtatttcagcgccgccgtgtcccggcccggccgcggggagccccgcttcatcgccatgggctacgtggacgacacgcagttcgtgcggttcgacagcgactcggcgtgtccgaggatggagccgcgggcgccgtgggtggagcaggaggggccagagtattgggaagaggagacacggaacaccaaggcccacgcacagactgacagaatgaacctgcagaccctgcgcggctactacaaccagagcgaggccagttctcataccctccagtggatgattggctgcgacctggggtccgacggacgcctcctccgcgggtatgaacagtatgcctacgatggcaaggattacctcgccctgaacgaggacctgcgctcctggaccgcagcggacactgcggctcagatctccaagcgcaagtgtgaggcggccaatgtggctgaacaaaggagagcctacctggagggcacgtgcgtggagtggctccacagatacctggagaacgggaaggagatgctgcagcgcgcggacccccccaagacacacgtgacccaccaccctgtctttgactatgaggccaccctgaggtgctgggccctgggcttctaccctgcggagatcatactgacctggcagcgggatggggaggaccagacccaggacgtggagctcgtggagaccaggcctgcaggggatggaaccttccagaagtgggcagctgtggtggtgccttctggagaggagcagagatacacgtgccatgtgcagcatgaggggctgccggagcccctcatgctgagatggaagcagtcttccctgcccaccatccccatcatgggtatcgttgctggtctggttgtccttgcagctgtagtcactggagctgcggtcgctgctgtgctgtggaggaagaagagctcagattgaaaaggagggagctactctcaggctgcaatgtgaaacagctgccctgtgtgggactgagtggcaagatttgttcatgccttccctttgtgacttcaagaaccctgacttctctttctgcagagaccagcccacccctgtgcccaccatgaccctcttcctcatgctgaactgcattccttccccaatcacctttcctgttccagaaaaggggctgggatgtctccgtctctgtctcaaatttgtggtgcactgagctataacttacttctgtattaaaattagaatctgagtataaatttagtttttcaaattatttccaagagagattgatgggttaattaaaggagaagattcctgaaatttgagagacaaaataaatggaagacatgagaa

SEQ ID NO: 345518 - DNA, 1592 bp, Artificial Sequence
  derived and/or modified sequence
agtgtggtactttgtcttgaggagatgtcctggactcacacggaaacttagggctacggaatgaagttctcactcccattaggtgacaggtttttagagaagccaatcagcgtcgccgcggtcctggttctaaagtcctcgctcacccacccggactcattctccccagacgccaaggatggtggtcatggcaccccgaaccctcttcctgctactctcgggggccctgaccctgaccgagacctgggcgggctcccactccatgaggtatttcagcgccgccgtgtcccggcccggccgcggggagccccgcttcatcgccatgggctacgtggacgacacgcagttcgtgcggttcgacagcgactcggcgtgtccgaggatggagccgcgggcgccgtgggtggagcaggaggggccagagtattgggaagaggagacacggaacaccaaggcccacgcacagactgacagaatgaacctgcagaccctgcgcggctactacaaccagagcgaggccagttctcataccctccagtggatgattggctgcgacctggggtccgacggacgcctcctccgcgggtatgaacagtatgcctacgatggcaaggattacctcgccctgaacgaggacctgcgctcctggaccgcagcggacactgcggctcagatctccaagcgcaagtgtgaggcggccaatgtggctgaacaaaggagagcctacctggagggcacgtgcgtggagtggctccacagatacctggagaacgggaaggagatgctgcagcgcgcggacccccccaagacacacgtgacccaccaccctgtctttgactatgaggccaccctgaggtgctgggccctgggcttctaccctgcggagatcatactgacctggcagcgggatggggaggaccagacccaggacgtggagctcgtggagaccaggcctgcaggggatggaaccttccagaagtgggcagctgtggtggtgccttctggagaggagcagagatacacgtgccatgtgcagcatgaggggctgccggagcccctcatgctgagatggaagcagtcttccctgcccaccatccccatcatgggtatcgttgctggtctggttgtccttgcagctgtagtcactggagctgcggtcgctgctgtgctgtggaggaagaagagctcagattgaaaaggagggagctactctcaggctgcaatgtgaaacagctgccctgtgtgggactgagtggcaagatttgttcatgccttccctttgtgacttcaagaaccctgacttctctttctgcagagaccagcccacccctgtgcccaccatgaccctcttcctcatgctgaactgcattccttccccaatcacctttcctgttccagaaaaggggctgggatgtctccgtctctgtctcaaatttgtggtgcactgagctataacttacttctgtattaaaattagaatctgagtataaatttagtttttcaaattatttccaagagagattgatgggttaattaaaggagaagattcctgaaatttgagagacaaaataaatggaagacatgagaacttt

SEQ ID NO: 345519 - DNA, 1578 bp, Artificial Sequence
  derived and/or modified sequence
agtgtggtactttgtcttgaggagatgtcctggactcacacggaaacttagggctacggaatgaagttctcactcccattaggtgacaggtttttagagaagccaatcagcgtcgccgcggtcctggttctaaagtcctcgctcacccacccggactcattctccccagacgccaaggatggtggtcatggcgccccgaaccctcttcctgctgctctcgggggccctgaccctgaccgagacctgggcgggctcccactccatgaggtatttcagcgccgccgtgtcccggcccggccgcggggagccccgcttcatcgccatgggctacgtggacgacacgcagttcgtgcggttcgacagcgactcggcgtgtccgaggatggagccgcgggcgccgtgggtggagcaggaggggccggagtattgggaagaggagacacggaacaccaaggcccacgcacagactgacagaatgaacctgcagaccctgcgcggctactacaaccagagcgaggccagttctcacaccctccagtggatgattggctgcgacctggggtccgacggacgcctcctccgcgggtatgaacagtatgcctacgatggcaaggattacctcgccctgaacgaggacctgcgctcctggaccgcagcggacactgcggctcagatctccaagcgcaagtgtgaggcggccaatgtggctgaacaaaggagagcctacctggagggcacgtgcgtggagtggctccacagatacctggagaacgggaaggagatgctgcagcgcgcggacccccccaagacacacgtgacccaccaccctgtctttgactatgaggccaccctgaggtgctgggccctgggcttctaccctgcggagatcatactgacctggcagcgggatggggaggaccagacccaggacgtggagctcgtggagaccaggcctgcaggggatggaaccttccagaagtgggcagctgtggtggtgccttctggagaggagcagagatacacgtgccatgtgcagcatgaggggctgccggagcccctcatgctgagatggaagcagtcttccctgcccaccatccccatcatgggtatcgttgctggcctggttgtccttgcagctgtagtcactggagctgcggtcgctgctgtgctgtggagaaagaagagctcagattgaaaaggagggagctactctcaggctgcaatgtgaaacagctgccctgtgtgggactgagtggcaagtccctttgtgacttcaagaaccctgacttctctttgtgcagagaccagcccacccctgtgcccaccatgaccctcttcctcatgctgaactgcattccttccccaatcacctttcctgttccagaaaaggggctgggatgtctccgtctctgtctcaaatttgtggtccactgagctataacttacttctgtattaaaattagaatctgagtgtaaatttactttttcaaattatttccaagagagattgatgggttaattaaaggagaagattcctgaaatttgagagacaaaataaatggaagacatgagaacttt

SEQ ID NO: 345520 - DNA, 1592 bp, Artificial Sequence
  derived and/or modified sequence
agtgtggtactttgtcttgaggagatgtcctggactcacacggaaacttagggctacggaatgaagttctcactcccattaggtgacaggtttttagagaagccaatcagcgtcgccgcggtcctggttctaaagtcctcgctcacccacccggactcattctccccagacgccaaggatggtggtcatggcaccccgaaccctcttcctgctactctcgggggccctgaccctgaccgagacctgggcgggctcccactccatgaggtatttcagcgccgccgtgtcccggcccggccgcggggagccccgcttcatcgccatgggctacgtggacgacacgcagttcgtgcggttcgacagcgactcggcttgtccgaggatggagccgcgggcgccgtgggtggagcaggaggggccagagtattgggaagaggagacacggaacaccaaggcccacgcacagactgacagaatgaacctgcagaccctgcgcggctactacaaccagagcgaggccagttctcataccctccagtggatgattggctgcgacctggggtccgacggacgcctcctccgcgggtatgaacagtatgcctacgatggcaaggattacctcgccctgaacgaggacctgcgctcctggaccgcagcggacactgcggctcagatctccaagcgcaagtgtgaggcggccaatgtggctgaacaaaggagagcctacctggagggcacgtgcgtggagtggctccacagatacctggagaacgggaaggagatgctgcagcgcgcggacccccccaagacacacgtgacccaccaccctgtctttgactatgaggccaccctgaggtgctgggccctgggcttctaccctgcggagatcatactgacctggcagcgggatggggaggaccagacccaggacgtggagctcgtggagaccaggcctgcaggggatggaaccttccagaagtgggcagctgtggtggtgccttctggagaggagcagagatacacgtgccatgtgcagcatgaggggctgccggagcccctcatgctgagatggaagcagtcttccctgcccaccatccccatcatgggtatcgttgctggcctggttgtccttgcagctgtagtcactggagctgcggtcgctgctgtgctgtggaggaagaagagctcagattgaaaaggagggagctactctcaggctgcaatgtgaaacagctgccctgtgtgggactgagtggcaagatttgttcatgccttccctttgtgacttcaagaaccctgacttctctttctgcagagaccagcccacccctgtgcccaccatgaccctcttcctcatgctgaactgcattccttccccaatcacctttcctgttccagaaaaggggctgggatgtctccgtctctgtctcaaatttgtggtgcactgagctataacttacttctgtattaaaattagaatctgagtataaatttagtttttcaaattatttccaagagagattgatgggttaattaaaggagaagattcctgaaatttgagagacaaaataaatggaagacatgagaacttt

SEQ ID NO: 345521 - DNA, 1578 bp, Artificial Sequence
  derived and/or modified sequence
agtgtggtactttgtcttgaggagatgtcctggactcacacggaaacttagggctacggaatgaagttctcactcccattaggtgacaggtttttagagaagccaatcagcgtcgccgcggtcctggttctaaagtcctcgctcacccacccggactcattctccccagacgccaaggatggtggtcatggcgccccgaaccctcttcctgctgctctcgggggccctgaccctgaccgagacctgggcgggctcccactccatgaggtatttcagcgccgccgtgtcccggcccggccgcggggagccccgcttcatcgccatgggctacgtggacgacacgcagttcgtgcggttcgacagcgactcggcgtgtccgaggatggagccgcgggcgccgtgggtggagcaggaggggccggagtattgggaagaggagacacggaacaccaaggcccacgcacagactgacagaatgaacctgcagaccctgcgcggctactacaaccagagcgaggccagttctcacaccctccagtggatgattggctgcgacctggggtccgacggacgcctcctccgcgggtatgaacagtatgcctacgatggcaaggattacctcgccctgaacgaggacctgcgctcctggaccgcagcggacactgcggctcagatctccaagcgcaagtgtgaggcggccaatgtggctgaacaaaggagagcctacctggagggcacgtgcgtggagtggctccacagatacctggagaacgggaaggagatgctgcagcgcgcggacccccccaagacacacgtgacccaccaccctgtctttgactatgaggccaccctgaggtgctgggccctgggcttctaccctgcggagatcatactgacctggcagcgggatggggaggaccagacccaggacgtggagctcgtggagaccaggcctgcaggggatggaaccttccagaagtgggcagctgtggtggtgccttctggagaggagcagagatacacgtgccatgtgcagcatgaggggctgccggagcccctcatgctgagatggaagcagtcttccctgcccaccatccccatcatgggtatcgttgctggcctggttgtccttgcagctgtagtcactggagctgcggtcgctgctgtgctgtggagaaagaagagctcagattgaaaaggagggagctactctcaggctgcaatgtgaaacagctgccctgtgtgggactgagtggcaagtccctttgtgacttcaagaaccctgacttctctttgtgcagagaccagcccacccctgtgcccaccatgaccctcttcctcatgctgaactgcattccttccccaatcacctttcctgttccagaaaaggggctgggatgtctccgtctctgtctcaaatttgtggtccactgagctataacttacttctgtattaaaattagaatctgagtataaatttactttttcaaattatttccaagagagattgataggttaattaaaggagaagattcctgaaatttgagagacaaaataaatggaagacatgagaacttt

SEQ ID NO: 345522 - DNA, 1032 bp, Artificial Sequence
  derived and/or modified sequence
atgaagacccccaggatggtggtgatggcccccaggaccctcttcctgctgctgagcggggccctgaccctgacagagacctgggccggcagccacagcatgagatacttctctgctgctgtgtcccggcccggccgcggggagccccgcttcatcgccatgggctacgtggatgacacccagtttgtgcgctttgacagcgacagcgcctgccccaggatggagccccgggccccctgggtggagcaggagggccctgagtactgggaggaggagaccaggaacaccaaggcccacgcccagacagacaggatgaacctgcagaccctgcggggctactacaaccagagcgaggccagcagccacaccctgcagtggatgattggctgtgacctgggcagtgatggccgcctgctgcggggctatgagcagtatgcctatgatggcaaggactacctggccctgaatgaagacctgcgctcctggacagctgctgacacagctgcccagatcagcaagaggaaatgtgaggccgccaacgtggccgagcagaggcgggcctacctggagggcacctgtgtggagtggctgcaccgctacctggagaatggcaaggagatgctgcagagagctgacccccccaagacccacgtgacccaccaccctgtgtttgattatgaggccaccctgcgctgctgggccctgggcttctacccagctgagatcatcctgacctggcagagagatggagaggaccagacccaggatgtggagctggtggagaccaggcctgctggagatggcaccttccagaagtgggccgctgtggtggtgcccagcggggaggagcagcgctacacctgccacgtgcagcacgagggcctgcctgagcccctgatgctgcgctggaagcagagcagcctgcccaccatccccatcatgggcatcgtggccggcctggtggtgctggccgctgtggtgactggagctgctgtggccgctgtgctgtggaggaagaagagcagtgactag

SEQ ID NO: 345523 - DNA, 1032 bp, Artificial Sequence
  derived and/or modified sequence
atgaagaccccccggatggtggtgatggccccccggaccctgttcctattgctctctggggcactgactttaactgaaacctgggccggtagccactccatgcgttacttcagcgcggccgtgtctagaccaggccgtggcgaaccacggttcattgcaatgggatacgtggacgacacacagttcgttaggttcgactcagattctgcatgcccaagaatggagcctcgggcaccctgggtcgaacaagaggggcccgaatattgggaagaggagacccgcaacacaaaggctcacgcgcaaacggacagaatgaatctacaaacgctgagaggttactataaccagtccgaagcttcgtcccataccctccagtggatgataggatgtgacctcggaagtgacgggagacttctgaggggctatgaacagtacgcctatgatggaaaggactatctggccttgaatgaagacttgcgatcttggactgccgccgatacagcagctcagatttccaagcgcaaatgcgaagctgccaatgtcgctgagcaaaggcgggcctatctggaggggacgtgcgtggagtggcttcataggtatctcgagaatggaaaggagatgctacaacgggcagatccccccaaaacgcacgtgacacatcatcccgtgtttgactacgaggccacgcttaggtgttgggcactgggtttttatccagcagagattatactgacatggcagcgcgatggggaggaccagacacaggacgtggagttggtggagaccaggcccgcaggagatggcaccttccagaaatgggcagccgtagtcgtgccgtctggcgaagagcagcgatacacttgccacgttcagcacgagggtttgcccgaaccactaatgctgcggtggaaacaatccagcctgccaacaatacccattatgggcattgttgcggggctggtggtgttggccgccgtcgtgaccggagctgctgtagccgctgtcctgtggcgcaagaagtcaagcgactag

SEQ ID NO: 345524 - DNA, 1032 bp, Artificial Sequence
  derived and/or modified sequence
atgaagaccccccggatggtggtgatggccccccggaccctgttcctgctgctgtccggcgcattaacactgacagagacatgggctgggagccatagcatgcgttacttctccgctgccgtgtcacgcccagggaggggggaacctcgatttatcgcaatggggtacgtcgatgatacccagttcgttcgcttcgattcagatagcgcctgccctagaatggaacctagagccccttgggtggagcaggagggaccagagtactgggaggaggagacacgcaacaccaaagcccacgcacagaccgatcggatgaacctgcaaacgctgagggggtattacaatcaatcagaagcatcgtcacataccctgcagtggatgatcggctgtgatctgggttccgatggcagacttctgaggggctatgaacagtatgcatacgacggaaaagactatttagcgctcaacgaagacctccgctcgtggactgcagcagatactgccgcgcagataagtaaaagaaagtgcgaggcagcaaacgtggccgaacagaggagagcatatttagaagggacctgcgtcgagtggctgcatagatatctggagaatggaaaggaaatgctgcagcgtgccgatcccccaaagacacatgtcacacaccatccagtgttcgactacgaggctactctgaggtgctgggccctagggttttatccggccgagattatcctgacatggcagcgcgacggcgaagaccagacgcaagatgtggagctggtggaaacacgtcccgcaggcgatggcacatttcagaaatgggctgcagtagtcgtcccgtctggggaagaacaaagatatacgtgtcatgtacagcacgaggggttgccggaaccactcatgcttagatggaagcagagcagtctacctacgataccaatcatgggcatcgtggctggattggtagtactcgccgcggttgttacaggcgcagccgtggccgccgtcctgtggaggaaaaagtctagcgattag

SEQ ID NO: 345525 - DNA, 1032 bp, Artificial Sequence
  derived and/or modified sequence
atgaagaccccccggatggtggtgatggccccccggaccctgttccttctcttatccggtgcactaacactgacggagacctgggccggaagtcattctatgagatacttttctgctgctgtctcaagaccaggacggggagaaccccgcttcattgctatgggttacgtggacgatacccagtttgtcagattcgattccgattctgcctgtcccagaatggagccgagggctccttgggtggaacaggaaggcccagagtattgggaggaggaaaccaggaacaccaaagcacatgcacagaccgatcggatgaatctgcagacactgcgaggatattacaaccagtcggaagcctcatcgcatacgttacagtggatgattggctgcgaccttggatcagacggcaggcttcttcggggctatgaacaatatgcatacgacgggaaggactatctggctctgaatgaagatctgagatcgtggacagccgccgacaccgccgcccagatcagcaagcgtaaatgtgaggccgcgaatgtggctgagcagcggcgtgcttatttggagggaacgtgcgtagagtggctccatagatatctggagaacggtaaggagatgctgcagcgagcagatccacccaaaacccacgtgactcatcaccctgtgttcgactatgaagcaactctgaggtgctgggctcttggcttctaccctgccgagatcatcctgacttggcagagagacggagaggatcagactcaagacgtggaactcgtggaaacaaggcccgctggcgatggcacattccagaagtgggctgcagtggtagtgccttccggggaagagcaaaggtacacgtgtcatgtgcagcatgagggtctacccgaaccgctgatgctaaggtggaagcagtcgagcctccccactattcccataatgggcattgtggctggcctagtcgtcctggcagctgttgtcacaggcgccgccgtggcagcggtgctgtggaggaagaagtcttccgattag

SEQ ID NO: 345526 - DNA, 1032 bp, Artificial Sequence
  derived and/or modified sequence
atgaagaccccccggatggtggtgatggccccccggaccctgttcctcctgctctcaggcgccctgactctcacggagacatgggccggatcccacagcatgcgatatttctccgccgccgtgagcaggccaggccgcggggagccacgtttcatcgccatggggtacgttgacgacacccaattcgtccgatttgatagcgacagcgcctgtccaaggatggagcctagagccccatgggtggagcaagagggccccgaatactgggaggaggagacacgcaacaccaaggcccacgcccagacagatcgcatgaatctgcagacactgcgtggatactacaaccaatctgaagccagttcacataccctccagtggatgatcggctgtgacctaggttcagatgggagactgctgcgcggatacgaacagtatgcatacgacggaaaggactacctggctttgaacgaggatttgaggagctggacagcggccgataccgctgcacagatcagtaaaagaaaatgcgaggccgcgaacgtggctgagcaaagaagggcatacctggaaggaacctgtgttgagtggctgcatagatacttagaaaacgggaaagagatgctccagcgggcggatccgccaaagacccacgtgacccaccacccagtgttcgactatgaggccaccctgcgctgttgggcacttggtttctaccctgcagaaattatccttacatggcagagggacggggaggatcagacgcaggacgtcgagttagtggagacccgtcctgcaggggacggcaccttccagaagtgggctgccgtcgtcgtgcctagcggtgaagagcaacgctacacctgccatgtacagcatgagggtctgccagaacctttgatgttgcggtggaaacagtccagcctacccacaattcccatcatgggcattgttgctggtctggttgtcctcgccgccgttgtgaccggcgccgctgtagctgccgtcttgtggcgcaaaaagtcctctgattag

SEQ ID NO: 345527 - DNA, 1032 bp, Artificial Sequence
  derived and/or modified sequence
atgaagaccccccggatggtggtgatggccccccggaccctgttcttgctgctgagcggggcacttaccctaactgaaacttgggctggatcacattctatgagatacttttcggccgctgtgagtcgacccggacggggcgagccaaggttcattgcaatggggtacgtggacgatacccagttcgtgagattcgactctgacagtgcctgtcctcggatggaacctagggccccttgggtggagcaggaaggcccagagtactgggaggaagagacgaggaacacgaaggcacacgctcagacggacagaatgaacctgcaaactcttagaggttattacaaccagtccgaagcttcgagccatacacttcagtggatgattggttgcgaccttggttcagatggccggcttctgagagggtatgagcagtatgcttacgacggcaaagactacttggctctcaacgaggacctgcggagctggactgccgcggacacggcagcacaaatctcaaaacggaagtgtgaagctgccaacgttgcagagcaaaggagggcttacctggaggggacttgtgttgaatggctgcataggtacctggagaatggaaaagaaatgctacagagagccgacccccctaagacccacgttacacaccaccccgtgttcgactatgaagccaccctgaggtgttgggccctcggcttctatcctgctgaaattattctgacatggcaacgcgatggtgaggaccaaactcaagatgttgaattagtggaaacgcgccccgccggagacgggaccttccagaaatgggcagcagtcgtggttccaagcggtgaagaacagcgctacacatgccatgtgcagcacgagggcctgccggagcctcttatgttgaggtggaagcagagttctctgccaactatacctatcatggggattgtagctggactagttgtgcttgcggctgtggtgacgggtgccgcagtggctgcagtgctttggcggaagaaatcctctgattag

SEQ ID NO: 345528 - DNA, 1032 bp, Artificial Sequence
  derived and/or modified sequence
atgaagaccccccggatggtggtgatggccccccggaccctgttcttgttgttgtccggggccctcacactaacagagacatgggcgggatcacattctatgcgctatttctccgccgccgtgtccagaccaggtagaggcgagcctcgattcatcgccatggggtacgtggacgatactcagttcgtgcgcttcgattccgactccgcctgtccgcgaatggagcccagagctccctgggttgagcaagaaggaccggagtattgggaggaggagactaggaataccaaggcgcacgcacagactgatcggatgaacttacagaccctccgcggctactacaatcaaagtgaggcatcttcacacactctgcagtggatgatcggctgcgacttgggaagtgatggccgactgctacgcgggtacgagcaatacgcgtatgacggcaaagattaccttgcccttaacgaagatctcagaagttggacggcagccgacaccgccgcacagatatctaaacgcaagtgcgaagctgccaatgtcgccgagcagcgccgcgcatacttggaggggacttgcgtggagtggctgcaccgatacctcgaaaatggtaaagaaatgctgcaaagagctgaccccccaaaaactcatgtgacacatcatccagtgtttgattatgaagccacactacggtgctgggccctgggcttctaccccgcggagattattctgacatggcagagggacggggaagatcagacccaagatgtggagctcgtggagacgcggcccgccggcgacggcacattccagaagtgggctgctgtggtcgtgccgtccggagaagaacagcggtatacatgtcacgtgcagcacgaaggcctgcctgaacctctcatgctgcgttggaagcagagtagtctcccaactattccaatcatgggtatcgtggcaggcctggtggttctggccgctgtggtgaccggcgccgctgtggccgcagtgctctggaggaagaaatcatcggattag

SEQ ID NO: 345529 - DNA, 1032 bp, Artificial Sequence
  derived and/or modified sequence
atgaagaccccccggatggtggtgatggccccccggaccctgttcctgctgctgtcaggagcgttgaccttgacagagacttgggctggctctcattccatgagatatttctctgccgctgtgagcaggcctggacgaggagagcctaggttcatcgctatgggctatgtggatgatacacagttcgtgaggtttgacagtgactccgcttgtccgcgcatggaaccccgcgccccctgggtggaacaagagggccctgagtactgggaagaggagacaaggaatacgaaggctcatgcacaaaccgatcgcatgaatctgcagactttgcgaggctactataaccagtcagaggcttcttcccacactctgcagtggatgattggttgtgacctgggctctgacggccgcctgctacgcggatatgaacagtatgcctatgatggcaaagactacctggctcttaacgaggatttgcgttcttggaccgccgccgacaccgccgcccagatctccaaacgaaaatgcgaggctgctaatgtggcagaacaacgaagagcctacctggagggtacttgtgtggagtggctgcaccgatatttggagaatggaaaggagatgctgcagagagctgacccgcctaagacccacgttacccaccaccccgtatttgattatgaagccacccttagatgctgggccctaggattctaccccgctgagatcattctaacctggcagagagacggcgaagatcagacacaggatgtggaactcgtggaaacaaggccagcaggcgacggaacgtttcaaaagtgggctgccgttgtcgtaccaagcggtgaagagcaacgctacacctgccacgtgcagcatgaaggactgcccgaaccactgatgcttcgttggaagcagagcagcttacccaccattccaattatgggcatagtcgcgggcctggttgtcctggccgccgtcgtgaccggcgccgcagtggctgccgtgctgtggcgcaaaaaaagttccgactag

SEQ ID NO: 345530 - DNA, 1032 bp, Artificial Sequence
  derived and/or modified sequence
atgaaaactccaagaatggtcgtcatggcacctaggacactttttctgctgctttccggagctctgacgctgaccgagacctgggcgggatcgcattccatgcggtatttctccgccgctgtctcgaggcctggaagaggggaacccagatttattgcaatgggctatgtagacgatacacagtttgtgcgttttgattctgatagcgcctgtcccagaatggaaccacgtgccccatgggtcgagcaggagggccctgaatattgggaagaggagacacgaaatacaaaggcgcacgcgcagactgaccgcatgaacctccagaccctgagaggctactacaatcaatcagaggcctccagtcacaccctacagtggatgattggttgtgacttggggtcggatggtcggcttctacggggatacgagcagtatgcttacgacggaaaagactaccttgccttaaacgaggatctccgctcctggaccgccgctgacacagccgcacagatatcaaaaaggaagtgcgaggccgctaacgtggctgaacagcggcgagcttatctggagggcacctgtgtcgagtggttacaccgctaccttgagaatggcaaggaaatgcttcagcgcgcagatccgcctaaaacacatgtgacacatcaccccgtatttgactacgaggccaccctgagatgttgggcgctcggattttaccccgctgaaatcattttaacatggcagcgagacggagaggaccagacccaagatgttgaactggttgagacaaggcctgccggagatgggacgtttcagaagtgggctgccgtggtggtacctagcggagaggagcaacggtatacctgtcatgtccagcacgagggactgcccgaaccgctgatgctcaggtggaagcagagttctctgcccactatacctatcatgggaatcgtggctggacttgtggtactcgccgcagtcgtgacgggagccgcagtagctgccgttctgtggaggaaaaagtccagcgattag

SEQ ID NO: 345531 - DNA, 1032 bp, Artificial Sequence
  derived and/or modified sequence
atgaaaacgccaagaatggttgtcatggcacctaggacactgtttcttctcctgtccggggctctgacactcacggaaacatgggcaggatctcactcaatgcgctacttctccgcggcagtgtctagacctgggaggggggaacccaggttcattgcaatgggatacgtggatgatacacagtttgttaggttcgacagcgattcagcctgtccgaggatggagcctcgagctccctgggtcgagcaggaggggcctgagtactgggaggaggagaccaggaacacaaaagctcatgcccaaacagataggatgaatctccagacattaaggggctattataaccaatccgaggctagttctcatacgctgcagtggatgatcgggtgtgatctggggagcgatggcagactgcttcgaggctacgagcaatatgcctatgatggaaaagactatctcgcgctgaatgaggatctgcgaagttggacggccgcagacaccgctgcccagatctcaaagcgaaaatgcgaggcagccaatgtggctgaacagcgtcgcgcttacttggaaggtacatgcgttgagtggctccatcggtacctggagaacggaaaagaaatgttgcagcgcgcagatccccctaaaactcacgtcacacaccacccggtgttcgactatgaagcgacgctgcgctgttgggccctcggattttaccctgccgagattattctcacatggcagcgggacggggaggatcagactcaggatgtggaactggtcgagacacggccagctggggatggtacatttcaaaagtgggccgcagtggtagtgcccagcggggaagagcagagatacacttgccacgtgcagcacgagggattgccagagcctctaatgttgcgatggaagcagtcaagcctgcccactattcctataatgggcatagtagctggactggtagtcttggcagcagtggtaaccggagccgctgtggccgcagttctgtggcggaaaaaaagctcagattag

SEQ ID NO: 345532 - DNA, 1032 bp, Artificial Sequence
  derived and/or modified sequence
atgaagactccgagaatggttgtgatggcaccacggaccctgtttctcttactgtccggggctttgactcttacagagacttgggctggtagccactctatgcggtatttcagcgccgctgtgtcacgacccggtagaggcgagcccaggtttattgctatgggatacgtggacgatactcagttcgtgaggtttgattccgatagtgcctgtcctaggatggagcctcgcgctccatgggttgaacaggaaggccctgagtactgggaagaagaaacccggaataccaaagcacacgctcagacagaccgcatgaacctccaaaccctgagaggctattacaatcagagtgaagcctctagtcatacccttcagtggatgattggctgtgacctaggttccgatggcagacttctgcgcggatacgaacagtatgcttacgatggcaaggactatctggcgcttaatgaagaccttcgcagctggacggctgcagacactgcagcccagatctccaaacgcaagtgcgaagccgcaaatgtcgcggaacagaggcgggcttatctcgagggtacgtgcgtggaatggctgcacagataccttgagaacggcaaggagatgttacaacgggcagacccacccaaaacacacgtgacgcatcacccagtcttcgattacgaagccacattacgctgctgggccttgggattctacccggcagaaattatcctcacttggcaacgggacggggaggatcagacacaagacgtggagctcgtggaaaccaggcccgcaggtgatggaacctttcagaaatgggcagcagtggtggtgccttccggcgaggaacagcgttatacttgtcatgtccagcacgagggcttgcccgaacccttgatgttaaggtggaaacaatcgagccttccaactataccaatcatgggaattgtggcgggactcgtcgtgctggcggctgtagtcacaggcgctgctgtggcagctgtgctctggcgcaagaagtcaagcgattag

SEQ ID NO: 345533 - DNA, 1032 bp, Artificial Sequence
  derived and/or modified sequence
atgaaaaccccgcgaatggtggttatggctccacgaaccctgttcttgttactcagcggagcccttacactgactgagacctgggccggatcacattccatgcgatacttttctgctgccgtgtcccggcctggacgaggcgagcctagattcattgccatgggatacgtggacgatacacagttcgtgaggtttgactcagatagtgcctgcccacgcatggagcctcgcgctccttgggtcgaacaggagggcccagagtactgggaagaggagacccgcaacacaaaagcacacgcgcagactgatagaatgaatctgcaaaccttgaggggctattacaaccagtctgaagcaagttcccataccttacagtggatgattggttgtgacctgggctcagatgggaggttgctgcgcggttatgaacagtatgcgtacgatggcaaggactacctggctcttaatgaggatttgcgtagctggaccgcagccgacaccgctgcccagatctccaaacggaagtgcgaggcggcaaacgtggcagagcagaggcgagcttacttggaagggacctgtgtcgagtggctgcaccggtatctggaaaacggtaaagagatgcttcagagagccgacccaccaaaaactcacgtcacccaccaccccgtcttcgactacgaggctaccctacgctgttgggctcttggtttttaccccgctgaaatcattctcacttggcagagggatggcgaggatcagacacaggacgtggaactggttgagactcgccctgccggtgacggaacctttcaaaagtgggcagccgtggttgtaccgtcaggggaggaacagcggtatacctgccacgtccaacatgagggcctgcccgaaccactgatgctgagatggaagcagtcttcccttccgaccatcccaatcatgggtatcgtggccggtctggtggtcctagccgcagtcgtaaccggagccgcagtagcagcggttttgtggcgcaaaaagtcaagcgattag

SEQ ID NO: 345534 - DNA, 1032 bp, Artificial Sequence
  derived and/or modified sequence
atgaagactccacggatggttgtgatggcaccacgtactctctttctcctgctgtccggcgcactgaccctgacagaaacctgggctggatctcactcgatgcgttatttcagcgccgctgtctctagacccggaagaggggaaccaaggttcattgcaatggggtacgtggacgatactcagtttgtgaggttcgattctgatagcgcctgtcccagaatggaacctcgcgcaccttgggtcgaacaagagggcccagaatactgggaggaagagacaagaaacacaaaagcacacgcgcagactgatagaatgaacctgcaaactctgagaggatactataaccaaagcgaggccagttcccatactctgcaatggatgatcggatgtgacctggggagtgacggtcgcttgctgaggggctacgaacagtacgcatacgatggtaaagactacctagcgttaaatgaggaccttaggtcttggaccgctgccgatacggccgcacagattagcaagcggaagtgtgaagccgcaaacgttgcagaacagcggagggcctacctggagggcacttgcgtagagtggctgcatagatacttagaaaatgggaaggaaatgctgcagcgcgcagaccctcccaagacccatgtcacccaccaccctgtctttgactacgaggccacccttagatgctgggcactaggtttctacccagcagaaatcattttgacttggcaacgagatggggaggaccagactcaggatgtagagttggttgagacgagacccgctggggacgggaccttccaaaagtgggcagccgtagtcgtgccctctggagaagagcagcggtacacctgccatgtgcagcatgagggtctcccagaacccctgatgctccgttggaaacaatccagtctgcccacaattccaattatggggattgtcgctgggctggtggtcctggccgctgtagtgacaggagccgctgtggccgcagtgctgtggagaaaaaagtcatcagattag

SEQ ID NO: 345535 - DNA, 1032 bp, Artificial Sequence
  derived and/or modified sequence
atgaagacacctaggatggtcgtgatggctcctaggactctctttctgctgctgtccggggcactgacactcaccgagacctgggcagggtcccatagcatgaggtatttctcagctgctgtgagcagacccggtaggggcgagcccagatttatcgcaatgggatatgtggacgacacccaattcgtgagattcgactctgatagcgcatgtccacgcatggaacctcgtgccccatgggtggaacaggagggtcctgagtactgggaagaggaaactaggaacactaaagcccatgcccaaactgatagaatgaatctgcaaaccctcagggggtactacaatcagtctgaggccagctcccacacccttcaatggatgattggctgtgacctgggatccgatggacggctgctccgtggttacgaacaatacgcgtacgatgggaaagattatttggcgcttaacgaagacctgcgtagttggacagcagctgacactgctgcacaaatctctaaacgcaagtgcgaggcagcaaacgtcgctgagcagagacgggcttacctggagggaacctgcgtggaatggctgcatcgttatcttgaaaacggcaaagaaatgctgcaacgggctgatcctcccaagacccacgtgacccatcaccccgtgtttgactatgaagcgacgttgcggtgctgggccctgggcttttacccagccgagattatcctgacatggcagcgggatggcgaagatcagacacaggacgtagagctggtggagacacggcctgccggagacggcaccttccaaaagtgggcagctgtcgttgtgcctagcggagaggagcagcggtatacgtgccacgtccagcacgagggcttgccagagcccctgatgctaaggtggaagcagtccagtctgcccactatcccaatcatgggaatcgtggctggcctggtggtgcttgccgctgttgtcactggtgccgctgtcgctgctgtactgtggcgcaagaaatcttcagattag

SEQ ID NO: 345536 - DNA, 1032 bp, Artificial Sequence
  derived and/or modified sequence
atgaaaaccccaaggatggtggtgatggcgcctcgcaccttattccttttgctttccggtgccttgacattaaccgagacctgggccggaagccactccatgcgctatttttccgctgcagtgagtaggccgggaagaggggagcctcgctttatcgcgatgggctacgtagacgacacgcagttcgtgcgctttgacagtgattccgcgtgccccagaatggagccccgtgctccctgggtggagcaagagggccctgaatactgggaggaggagactaggaatacaaaggcccacgcacagaccgatagaatgaaccttcaaaccctccggggttactacaaccaaagtgaggcctcttctcatactttacagtggatgatcgggtgcgacctgggcagtgacgggcgactgctaagaggctatgagcagtatgcctatgatgggaaggattacctcgccctcaatgaagaccttcgcagctggactgccgctgataccgccgctcagatcagtaagaggaaatgtgaagctgccaacgtggcagagcagagacgcgcttatctggagggaacatgtgtggagtggctgcatcggtacctggaaaatggaaaagaaatgctgcagcgagcggatccacccaagacccatgtgactcaccatccagtgttcgactacgaggcaaccctgaggtgctgggccctaggattctatcccgcagagattatattaacatggcagcgcgacggtgaagaccagacacaagatgtggagctggtggaaaccagacctgccggtgacggtactttccagaagtgggccgctgttgtggtgccgtccggcgaggaacagaggtatacttgtcacgtgcaacacgaaggattgccagagcccttaatgttgcgctggaagcagagttcactgccaaccatacctattatgggaatcgttgcgggtctcgttgtcctggctgctgtcgtcaccggagcagcagtggctgctgtgctgtggcggaaaaaaagttcggattag

SEQ ID NO: 345537 - protein, 295 aa, Artificial Sequence
  derived and/or modified sequence
MAVMAPRTLLLLLLGALALTQTWAGSHSMRYFTTSVSRPGRGEPRFIAVGYVDDTQFVRFDSDAASQRMEPRAPWIEQEGPEYWDLQTRNVKAQSQTDRAYLENGKETLQRTDAPKTHMTHHAVSDHEATLRCWALSFYPAEITLTWQRDGEDQTQDTELVETRPAGDGTFQKWASVVVPSGQEQRYTCHVQHEGLPKPLTLRWEPSSQPTIPIVGIIAGLVLFGAVFAGAVVAAVRWRRKSSGGEGMKGGSEISCLTEGSKTQVEVCPASLLGSTIHNYGPTQPGPCVPALTLL

SEQ ID NO: 345538 - DNA, 888 bp, Artificial Sequence
  derived and/or modified sequence
atggccgtgatggcccccagaaccctgctgctgctgctgctgggcgccctggccctgacccagacctgggccggcagccacagcatgagatacttcaccaccagcgtgagcagacccggcagaggcgagcccagattcatcgccgtgggctacgtggacgacacccagttcgtgagattcgacagcgacgccgccagccagagaatggagcccagagccccctggatcgagcaggagggccccgagtactgggacctgcagaccagaaacgtgaaggcccagagccagaccgacagagcctacctggagaacggcaaggagaccctgcagagaaccgacgcccccaagacccacatgacccaccacgccgtgagcgaccacgaggccaccctgagatgctgggccctgagcttctaccccgccgagatcaccctgacctggcagagagacggcgaggaccagacccaggacaccgagctggtggagaccagacccgccggcgacggcaccttccagaagtgggccagcgtggtggtgcccagcggccaggagcagagatacacctgccacgtgcagcacgagggcctgcccaagcccctgaccctgagatgggagcccagcagccagcccaccatccccatcgtgggcatcatcgccggcctggtgctgttcggcgccgtgttcgccggcgccgtggtggccgccgtgagatggagaagaaagagcagcggcggcgagggcatgaagggcggcagcgagatcagctgcctgaccgagggcagcaagacccaggtggaggtgtgccccgccagcctgctgggcagcaccatccacaactacggccccacccagcccggcccctgcgtgcccgccctgaccctgctgtag

SEQ ID NO: 345539 - DNA, 888 bp, Artificial Sequence
  derived and/or modified sequence
atggccgtgatggcccccagaaccctgctgctgctgctgctgggcgccctggccctgacccagacctgggccggcagccacagcatgagatacttcttcaccagcgtgagcagacccggcagaggcgagcccagattcatcgccgtgggctacgtggacgacacccagttcgtgagattcgacagcgacgccgccagccagagaatggagcccagagccccctggatcgagcaggagggccccgagtactgggaccaggagaccagaaacgtgaaggcccacagccagaccgacagaagatacctggagaacggcaaggagaccctgcagagaaccgacgcccccaagacccacatgacccaccacgccgtgagcgaccacgaggccaccctgagatgctgggccctgagcttctaccccgccgagatcaccctgacctggcagagagacggcgaggaccagacccaggacaccgagctggtggagaccagacccgccggcgacggcaccttccagaagtgggccagcgtggtggtgcccagcggccaggagcagagatacacctgccacgtgcagcacgagggcctgcccaagcccctgaccctgagatgggagcccagcagccagcccaccatccccatcgtgggcatcatcgccggcctggtgctgttcggcgccatgttcgccggcgccgtggtggccgccgtgagatggagaagaaagagcagcggcggcgagggcatgaagggcggcagcgagatcagctgcctgaccgagggcagcaagacccaggtggaggtgtgccccgccagcctgctgggcagcaccatccacaactacggccccacccagcccggcccctgcgtgcccgccctgaccctgctgtag

SEQ ID NO: 345540 - DNA, 888 bp, Artificial Sequence
  derived and/or modified sequence
atggccgtgatggcccccagaaccctggtgctgctgctgagcggcgccctggccctgacccagacctgggccggcagccacagcatgagatacttctacaccagcgtgagcagacccggcagaggcgagcccagattcatcgccgtgggctacgtggacgacacccagttcgtgagattcgacagcgacgccgccagccagagaatggagcccagagccccctggatcgagcaggagggccccgagtactgggacagaaacaccagaaacgtgaaggcccacagccagaccgacagagcctacctggagaacggcaaggagaccctgcagagaaccgacgcccccaagacccacatgacccaccacgccgtgagcgaccacgaggccaccctgagatgctgggccctgagcttctaccccgccgagatcaccctgacctggcagagagacggcgaggaccagacccaggacaccgagctggtggagaccagacccgccggcgacggcaccttccagaagtgggccagcgtggtggtgcccagcggccaggagcagagatacacctgccacgtgcagcacgagggcctgcccaagcccctgaccctgagatgggagcccagcagccagcccaccatccccatcgtgggcatcatcgccggcctggtgctgttcggcgccgtgatcgccggcgccgtggtggccgccgtgatgtggagaagaaagagcagcggcggcgagggcatgaagggcggcagcgagatcagctgcctgaccgagggcagcaagacccaggtggaggtgtgccccgccagcctgctgggcagcaccatccacaactacgagcccacccagcccggcccctgcgtgcccgccctgaccctgctgtag

SEQ ID NO: 345541 - DNA, 1050 bp, Artificial Sequence
  derived and/or modified sequence
atggcccccagaagcctgctgctgctgctgagcggcgccctggccctgaccgacacctgggccggcagccacagcctgagatacttcagcaccgccgtgagcagacccggcagaggcgagcccagatacatcgccgtggagtacgtggacgacacccagttcctgagattcgacagcgacgccgccatccccagaatggagcccagagagccctgggtggagcaggagggcccccagtactgggagtggaccaccggctacgccaaggccaacgcccagaccgacagagtggccctgagaaacctgctgagaagatacctggagaacggcaaggagaccctgcagagagccgacccccccaaggcccacgtggcccaccaccccatcagcgaccacgaggccaccctgagatgctgggccctgggcttctaccccgccgagatcaccctgacctggcagagagacggcgaggagcagacccaggacaccgagctggtggagaccagacccgccggcgacggcaccttccagaagtgggccgccgtggtggtgccccccggcgaggagcagagatacacctgccacgtgcagcacgagggcctgccccagcccctgatcctgagatgggagcagagcccccagcccaccatccccatcgtgggcatcgtggccggcctggtggtgctgggcgccgtggtgaccggcgccgtggtggccgccgtgatgtggagaaagaagagcagcgacagaaacagaggcagctacagccaggccgccgcctacagcgtggtgagcggcaacctgatgatcacctggtggagcagcctgttcctgctgggcgtgctgttccagggctacctgggctgcctgagaagccacagcgtgctgggcagaagaaaggcccagctgctgagcgtgagcaccagccagaccagcatcctgatccaggagcagttcagccaccagagaaccctggccatgagcggcaagatgttctgctgccacgactggagcgaggaggaggtgctgcccgccagctgcggcgagtag

SEQ ID NO: 345542 - DNA, 1050 bp, Artificial Sequence
  derived and/or modified sequence
atggcccccagaagcctgctgctgctgctgagcggcgccctggccctgaccgacacctgggccggcagccacagcctgagatacttcagcaccgccgtgagcagacccggcagaggcgagcccagatacatcgccgtggagtacgtggacgacacccagttcctgagattcgacagcgacgccgccatccccagaatggagcccagagagccctgggtggagcaggagggcccccagtactgggagtggaccaccggctacgccaaggccaacgcccagaccgacagagtggccctgagaaacctgctgagaagatacctggagaacggcaaggagaccctgcagagagccgacccccccaaggcccacgtggcccaccaccccatcagcgaccacgaggccaccctgagatgctgggccctgggcttctaccccgccgagatcaccctgacctggcagagagacggcgaggagcagacccaggacaccgagctggtggagaccagacccgccggcgacggcaccttccagaagtgggccgccgtggtggtgcccagcggcgaggagcagagatacacctgccacgtgcagcacgagggcctgccccagcccctgatcctgagatgggagcagagcccccagcccaccatccccatcgtgggcatcgtggccggcctggtggtgctgggcgccgtggtgaccggcgccgtggtggccgccgtgatgtggagaaagaagagcagcgacagaaacagaggcagctacagccaggccgccgcctacagcgtggtgagcggcaacctgatgatcacctggtggagcagcctgttcctgctgggcgtgctgttccagggctacctgggctgcctgagaagccacagcgtgctgggcagaagaaaggcccagctgctgagcgtgagcaccagccagaccagcatcctgatccaggagcagttcagccaccagagaaccctggccatgagcggcaagatgttctgctgccacgactggagcgaggagaaggtgctgcccgccagctgcggcgagtag

SEQ ID NO: 345543 - DNA, 1050 bp, Artificial Sequence
  derived and/or modified sequence
atggcccccagaagcctgctgctgctgctgagcggcgccctggccctgaccgacacctgggccggcagccacagcctgagatacttcagcaccgccgtgagcagacccggcagaggcgagcccagatacatcgccgtggagtacgtggacgacacccagttcctgagattcgacagcgacgccgccatccccagaatggagcccagagagccctgggtggagcaggagggcccccagtactgggagtggaccaccggctacgccaaggccaacgcccagaccgacagagtggccctgagaaacctgctgagaagatacctggagaacggcaaggagaccctgcagagagccgacccccccaaggcccacgtggcccaccaccccatcagcgaccacgaggccaccctgagatgctgggccctgggcttctaccccgccgagatcaccctgacctggcagagagacggcgaggagcagacccaggacaccgagctggtggagaccagacccgccggcgacggcaccttccagaagtgggccgccgtggtggtgcccagcggcgaggagcagagatacacctgccacgtgcagcacgagggcctgccccagcccctgatcctgagatgggagcagagcccccagcccaccatccccatcgtgggcatcgtggccggcctggtggtgctgggcgccgtggtgaccggcgccgtggtggccgccgtgatgtggagaaagaagagcagcgacagaaacagaggcagctacagccaggccgccgcctacagcgtggtgagcggcaacctgatgatcacctggtggagcagcctgttcctgctgggcgtgctgttccagggctacctgggctgcctgagaagccacagcgtgctgggcagaagaaaggcccagctgctgagcgtgagcaccagccagaccagcatcctgatccaggagcagttcagccaccagagaaccctggccatgagcggcaagatgttctgctgccacgactggagcgaggaggaggtgctgcccgccagctgcggcgagtag

SEQ ID NO: 345544 - DNA, 465 bp, Artificial Sequence
  derived and/or modified sequence
atggtggtgatggcccccagaaccctgttcctgctgctgagcggcgccctgaccctgaccgagacctgggccggcagccacagcatgagatacttcagcgccgccgtgagcagacccggcagaggcgagcccagattcatcgccatgggctacgtggacgacacccagttcgtgagattcgacagcgacagcgcctgccccagaatggagcccagagccccctgggtggagcaggagggccccgagtactgggaggaggagaccagaaacaccaaggcccacgcccagaccgacagaatgaacctgcagaccctgagaggctactacaaccagagcgaggccaagcagagcagcctgcccaccatccccatcatgggcatcgtggccggcctggtggtgctggccgccgtggtgaccggcgccgccgtggccgccgtgctgtggagaaagaagagcagcgactag

SEQ ID NO: 345545 - DNA, 741 bp, Artificial Sequence
  derived and/or modified sequence
atggtggtgatggcccccagaaccctgttcctgctgctgagcggcgccctgaccctgaccgagacctgggccggcagccacagcatgagatacttcagcgccgccgtgagcagacccggcagaggcgagcccagattcatcgccatgggctacgtggacgacacccagttcgtgagattcgacagcgacagcgcctgccccagaatggagcccagagccccctgggtggagcaggagggccccgagtactgggaggaggagaccagaaacaccaaggcccacgcccagaccgacagaatgaacctgcagaccctgagaggctactacaaccagagcgaggccaacccccccaagacccacgtgacccaccaccccgtgttcgactacgaggccaccctgagatgctgggccctgggcttctaccccgccgagatcatcctgacctggcagagagacggcgaggaccagacccaggacgtggagctggtggagaccagacccgccggcgacggcaccttccagaagtgggccgccgtggtggtgcccagcggcgaggagcagagatacacctgccacgtgcagcacgagggcctgcccgagcccctgatgctgagatggaagcagagcagcctgcccaccatccccatcatgggcatcgtggccggcctggtggtgctggccgccgtggtgaccggcgccgccgtggccgccgtgctgtggagaaagaagagcagcgactag

SEQ ID NO: 345546 - DNA, 888 bp, Artificial Sequence
  derived and/or modified sequence
atggctgttatggccccaagaaccttgttgctactcctgttaggggcgctggcactcacccagacatgggccggtagccacagcatgagatattttacgactagtgtttcacggccgggtcggggagaacccaggtttattgcagtgggctatgtggacgatacacagttcgtcagattcgactctgatgccgcgtcacagcggatggaaccccgagctccatggattgaacaagagggacccgaatactgggatcttcagacgcgcaatgtgaaggctcagagccaaaccgatagagcctatttggaaaacggaaaggagaccctgcagcgcaccgatgcccctaaaacccacatgactcatcatgccgtctccgatcacgaggctactttacggtgctgggcactgtccttctatcccgcagagatcaccctgacttggcaacgggatggtgaagaccagacacaggacacagaactcgtcgagactaggcccgccggagatggcactttccagaaatgggccagcgtagtcgtgcctagtggccaagagcagcggtatacctgccacgtgcaacacgaggggttgccaaaaccgctgacacttcgctgggagccctcttctcagccaactataccgatcgtgggcatcatagctggcctggtgctctttggtgccgtttttgcaggagccgtggtagccgcagtgcggtggcgacgaaagagtagtggtggggagggaatgaagggcggttctgagatttcatgcttaacggaaggttccaaaacgcaggtggaagtgtgccccgcctccttgctgggatccacaatccacaattatggtcccacccaacctggcccatgtgttccagctttgaccttattatag

SEQ ID NO: 345547 - DNA, 888 bp, Artificial Sequence
  derived and/or modified sequence
atggcagtaatggctccaaggaccctgctactgctgctcctaggagcacttgcccttacacagacatgggcaggtagtcactcaatgagatacttctttaccagcgtgtctaggccagggcgaggggaaccccgctttatcgcagtgggatacgtggacgacacgcaattcgtgagatttgattcagacgcggcatcccagcggatggagccacgagccccctggatcgaacaggaaggaccagaatattgggatcaggaaaccagaaatgtgaaggctcactcccagacggatagaaggtatttggagaacggtaaggagacactgcagcgtaccgacgcacctaaaacacatatgacacaccatgcggtctcagatcacgaggccacactacgttgttgggcgttgtccttttacccggccgagatcaccctgacatggcagcgtgacggggaggatcaaacacaggacaccgagttagtagagacgcggcctgccggtgatggcaccttccaaaagtgggcctctgttgttgtccccagcggccaagagcagcgctacacctgccacgtgcagcacgaggggttgcccaagccactgaccctgcggtgggaacccagcagccaacctaccatccccatagtgggcattattgccggcctggtgttgttcggagccatgttcgcaggggcagtggttgccgcggtacggtggcggaggaaatccagcgggggagaaggtatgaaaggtggcagcgagatcagctgtctgacagaaggaagcaaaacgcaggtggaggtgtgccctgcctctcttctgggctcgaccattcacaactacgggcccacacagcccgggccctgcgtgcccgcgctgactctcttgtag

SEQ ID NO: 345548 - DNA, 888 bp, Artificial Sequence
  derived and/or modified sequence
atggcggtgatggccccccgaacacttgtgttgctcctgagtggagctctggcacttacccagacttgggctggtagtcactccatgcgttatttctacacatccgtctctaggcctggacggggcgaaccccgcttcattgccgttggttacgttgacgacacgcagttcgttcggtttgacagcgatgccgcgagtcaaaggatggaaccgcgagccccatggattgagcaggagggtcctgagtattgggatcgcaacacaaggaatgtcaaagctcactctcagacggatcgcgcctacttggagaatggcaaagagactttgcagcgcaccgacgctcccaagacacacatgacccatcacgccgtgtctgatcatgaagctactctacggtgctgggcactgtccttctaccccgcagaaatcacactgacctggcagcgagacggtgaagaccaaacccaggatacagagctggtggaaactcgtcccgcaggagatgggaccttccaaaagtgggcatctgttgtcgtgccgtcgggtcaagaacagcgttatacctgtcatgtccagcacgagggtctgcctaaacctctgactctgcgctgggagcctagctcccaacccacgataccaatcgttggtattattgctggcctggtcctgtttggggctgtcatcgcaggcgccgtggtcgccgctgtcatgtggcggcggaagagctccggtggcgagggtatgaaaggaggaagcgagatctcgtgtttaacggagggcagcaagacacaggtggaggtatgccccgcttctttgctgggttccactattcacaattatgagcccacacagccggggccctgtgtgcccgctctgacgttgttgtag

SEQ ID NO: 345549 - DNA, 1050 bp, Artificial Sequence
  derived and/or modified sequence
atggcaccacgctccctgttgttgttgctgtctggtgctctggccctcacagacacttgggctggttctcattctctgcgatatttctccaccgcggtaagccgacctgggcggggcgagccgcgatacatcgccgtggaatatgtcgatgatacccagttcctgcgattcgactctgacgccgcaatcccacgaatggagcctcgtgagccatgggtcgagcaagagggcccccagtactgggaatggactaccggatacgcaaaagctaatgcccaaactgatcgcgtggctctgagaaacctgcttagaaggtaccttgaaaacggaaaagagacccttcagagggccgaccccccgaaagcccacgtcgcccaccaccccatctccgatcatgaagccactctgcgatgttgggcacttgggttctatccggcagagatcacattgacatggcagagagatggggaagagcagactcaggacactgagttggttgaaaccaggcctgcaggtgacgggacttttcaaaagtgggcagcggtagtggtgccccccggggaggagcagaggtacacgtgtcatgtccagcacgagggcctgcctcagcccctcatcctgagatgggagcagtcgcctcagcctaccattcctatagtgggaatcgtcgcagggcttgtggtcctaggagctgtcgtcacaggcgctgtggtcgcagccgtaatgtggagaaaaaagagctctgaccgcaaccgcggtagctattcacaggcagccgcctattcagtcgtgtctggtaacttgatgattacttggtggtcaagcctttttctgcttggggtcttgttccaggggtatctcggctgtttaaggtctcattctgtacttggtcggcggaaggctcaactgctgtcagtctccacaagccagaccagcatcttaatacaggaacagttttcccatcagcggactttggcaatgagtgggaaaatgttttgctgtcatgactggagtgaagaagaggtgctaccggcctcatgcggagaatag

SEQ ID NO: 345550 - DNA, 1050 bp, Artificial Sequence
  derived and/or modified sequence
atggccccccggtcccttcttcttctcctgtccggggctctggccctcactgatacttgggcaggcagccattctctccggtacttttctaccgcggttagtcgcccaggacgcggagagccacggtatattgctgtggaatatgtggatgacacacagttcttacggtttgacagcgacgcagcgattccacgtatggaaccccgtgaaccctgggtggagcaagagggaccccaatattgggagtggacaactggatacgccaaagctaacgcccagacggaccgggtcgctttacggaatttgcttaggcgatacctcgaaaatggcaaagaaaccctccagagggctgaccctccgaaagcgcatgtggcccatcacccaatctctgaccatgaagctaccctgagatgttgggccctgggtttctatcctgccgagataaccctgacctggcagcgcgacggggaggagcagacccaggataccgagctcgtcgagaccagaccagccggtgatgggacctttcagaaatgggcggctgtcgtggtgccctccggtgaggagcagcgctacacctgccacgtccagcacgaaggactcccccagcctctgattttgagatgggagcagtctccacagccgaccattcccatcgtcggtatcgtcgctggccttgtggttctgggagccgtcgttaccggagcagttgtggctgccgtgatgtggagaaagaaaagcagcgaccggaatcgggggagctactcgcaggcagccgcctatagtgtagtctcagggaacttgatgattacgtggtggtcaagtttattccttcttggtgtactctttcaaggatacctaggctgtctgagaagccacagcgtacttgggaggagaaaggcccagctgttgtccgtcagtacgtcacagacaagcatccttatccaggaacagttcagccatcaacggacactcgctatgtccggcaagatgttttgctgccacgattggtctgaagagaaggtgctaccagcctcttgtggcgagtag

SEQ ID NO: 345551 - DNA, 1050 bp, Artificial Sequence
  derived and/or modified sequence
atggctccccgatcgctgctcttactgctgtctggtgccttggcgctgactgatacctgggccggatctcacagtctgaggtatttctctacagccgtgagccgacccggccggggcgaaccaaggtacattgccgtggaatatgtggacgatacacagtttctgcgctttgacagcgatgcagccattcctagaatggagccgagagagccctgggtggagcaagaggggccgcagtactgggaatggacaaccggctacgccaaagcaaatgcacagactgatagagtggcactaaggaatctccttcggcgctatctggagaacggaaaagaaacgctgcaacgggccgaccctcccaaggcccatgtggcccatcaccccattagcgatcatgaagctactctgcggtgctgggcactgggtttttaccccgcagagattacactaacatggcagcgggacggagaggagcagacacaggatactgaactagtagagacccggccagccggggatggcacattccagaagtgggctgccgtggtagtaccctctggggaagaacaaagatacacctgccatgtgcaacacgagggtctgccccagcccctcattcttcggtgggaacagtcaccccagcccacaattccaattgtgggaatcgttgctggcctcgtcgtccttggagcggtggtgactggagcggtcgtggcagctgtgatgtggcggaaaaagtcctcagacaggaacaggggctcttattcacaagccgccgcctactccgtggtctccggtaatctgatgatcacttggtggagctccctcttcctcctcggtgtcctgttccaaggttaccttgggtgcttgcgttcacattccgtccttggacggcgaaaggcacagctgctcagcgtgagcacatcacagactagcatcctgatccaggaacagttttcgcatcaacgaacactggctatgtcgggaaagatgttctgctgccacgactggagcgaggagaaagtgttgcccgcttcgtgtggagaatag

SEQ ID NO: 345552 - DNA, 1050 bp, Artificial Sequence
  derived and/or modified sequence
atggcccctcggagtcttctgctgctcctttccggcgcactggccctgacggatacatgggcagggagtcactcactgaggtatttctcaacggccgtgtcacgacccggtcgcggggagcccagatacatcgccgtagagtacgtggatgacactcagttcctaagattcgatagcgatgctgcaatccccaggatggagcctcgagaaccctgggtcgaacaggaaggaccccagtattgggagtggaccaccggctatgcaaaggccaacgcgcaaacagatcgggtcgcccttcggaaccttctcagaaggtacctggagaacggaaaggaaactctccagcgcgctgaccctccaaaggcgcacgtggctcaccatccaattagcgaccacgaggcgactttgcggtgctgggcgctggggttctacccagccgaaatcaccctgacctggcagcgtgacggagaggagcaaacacaggataccgagctggttgaaacccggcccgccggtgatggcacctttcagaaatgggccgccgtcgttgtgccgagtggggaagaacagcgctatacttgtcacgtacaacacgaaggtttgcctcaaccccttatcttgaggtgggagcaaagcccacagccaactatccccatcgtcggtatagtggctgggctggttgtcctcggggctgtcgtaaccggcgccgtcgtggctgcggtcatgtggaggaaaaaaagttccgatcggaatagaggaagctatagtcaggcagctgcatacagtgtggtctctggaaatctgatgatcacctggtggtcaagtctttttctgttgggtgtactttttcaagggtatctggggtgcctccgttcacattccgttttaggacgaagaaaagcccaattgctttcagtctccacttcacagaccagcatcctgatacaggaacagttttctcaccagaggactcttgctatgtccggtaagatgttttgttgccacgactggagcgaagaaaaggtgctcccggcgagctgcggcgagtag

SEQ ID NO: 345553 - DNA, 1050 bp, Artificial Sequence
  derived and/or modified sequence
atggcacctcgaagcctgcttctgctcctctccggcgctctggcccttacagacacctgggccggctcccactcactgagatatttcagtaccgccgttagcaggccaggacggggagagcctagatacattgcagtcgaatacgttgacgacacacagtttctgcggttcgactctgatgcagcgatcccgagaatggagcccagggagccctgggtggaacaggaggggcctcagtattgggaatggacaactggttacgcaaaggctaacgcacagaccgatcgggtggcgctgcgtaacctgctacgccgttacctggaaaacggaaaggagaccctgcagcgggctgacccacccaaggcccatgtggcacaccatcctatatctgatcacgaggcaaccctgcgttgctgggccctaggtttctatccagccgagataaccctgacttggcagagggatggcgaagagcaaacccaggacacagagttggttgaaaccagaccggccggagatggcacgttccagaagtgggccgccgtggtggtgccgagtggcgaagagcagcgatacacttgccatgtccagcatgagggcctgccccagccactaatattgagatgggaacaatcaccacagcctaccatccctattgtaggtattgtggccgggcttgtagtactcggggctgtcgtcacgggagccgtggtggctgctgtgatgtggaggaaaaaaagcagtgacaggaatcgcggatcttactcacaggcggctgcctatagcgtagtttctggaaaccttatgataacctggtggagtagcctgttcctgctaggcgtgctgtttcagggctacttggggtgtctacgatcccacagtgtgctgggaaggaggaaggctcaactgctttctgtttccacaagccagacctccatcttgatccaggaacagttctcacatcagcgcaccctggcaatgtcagggaaaatgttctgttgccatgattggtccgaggaggaagttctgccagcaagctgcggcgagtag

SEQ ID NO: 345554 - DNA, 465 bp, Artificial Sequence
  derived and/or modified sequence
atggtcgttatggcgccacggaccctctttctgctcctttccggagccctaactttaactgagacatgggctggatcccatagcatgagatacttctctgccgctgtgagcaggcccgggaggggggagccaagatttatcgcaatgggatatgtggatgatacccagttcgtacgctttgacagcgacagtgcctgtcctaggatggaaccccgagccccgtgggtggaacaggaagggccagagtattgggaggaagaaaccaggaatactaaagcccatgctcaaaccgatagaatgaacctgcagaccctcagaggctactataaccaatcagaagcaaaacagtcatctcttcccacaatccctattatgggcattgtagctggtttggttgtcctggccgctgttgtcacaggggccgctgtggccgcggtcctatggaggaagaagtctagcgattag

SEQ ID NO: 345555 - DNA, 741 bp, Artificial Sequence
  derived and/or modified sequence
atggtggttatggccccacgcacccttttcctgctgctgagtggggccttaacattgaccgaaacctgggccggttcgcatagcatgagatacttttccgccgccgtcagtaggcctggcagaggtgagccacgctttatcgcaatggggtatgttgacgacacacaatttgttcgattcgatagcgattctgcgtgtcctcgaatggagccacgcgcaccttgggttgagcaagagggcccagagtattgggaggaggaaacccgcaataccaaggcccacgcacaaacagacagaatgaacctgcaaactttacgaggatattacaatcaatctgaagccaatccccccaagacccatgtgacccaccacccggtgttcgattacgaggctacactccgttgttgggcactgggcttttaccctgctgaaatcatcttgacatggcaacgggacggcgaggaccagacccaggatgttgaactcgtggaaacacggcctgcgggtgacggaacttttcaaaagtgggctgccgtcgtggtcccttctggcgaggaacagagatacacgtgccacgtacagcacgaaggccttcccgaaccactcatgctgaggtggaaacagtcttccctgcccaccatcccaatcatgggaatcgtggcagggctggtagtcctggctgccgtcgttaccggcgcggctgtggccgcggtgctgtggcgaaaaaaaagctcggattag

SEQ ID NO: 345556 - DNA, 465 bp, Artificial Sequence
  derived and/or modified sequence
atggtggtgatggcccctagaaccctgtttctgctgctctcaggagccctgactctgacagagacatgggccggatcccatagcatgaggtacttctccgccgctgtgagcaggcctggacgcggtgagcctcgatttatcgccatgggctacgtggatgacacccagttcgtgaggttcgactcagattctgcttgcccgagaatggaacctcgggctccatgggtcgagcaggaaggccctgaatattgggaggaggaaacacgaaacacaaaggcccacgctcaaactgaccgcatgaacttgcagacactgcgaggatattataaccaaagtgaggcaaagcaatctagccttccgacaatccccattatggggattgtcgcaggattggtagtgttggccgctgtggtcacgggtgcagccgttgcggccgtgctgtggagaaaaaaaagtagcgactag

SEQ ID NO: 345557 - DNA, 741 bp, Artificial Sequence
  derived and/or modified sequence
atggttgttatggccccgaggaccctgttccttctgctgagcggtgcacttactctcaccgaaacatgggccggtagtcattccatgcgatacttcagcgcggctgtctcacggccagggagaggggagccacggtttatagcaatgggatatgtggatgacacccagttcgtacgattcgactcagactccgcatgtcctcgtatggaacctcgcgctccttgggtggagcaggaaggccccgagtattgggaagaggagacccgtaacaccaaagctcacgcccagacagatcggatgaatttgcaaacgctgcgaggctactataatcagagtgaagccaacccgcccaagacccacgtaactcatcatccagtgtttgactacgaggctactctgcgctgctgggcactgggattttatccagccgaaataatcctaacatggcagcgagatggcgaagatcagacccaggatgtcgagttagtagagacgcgaccagccggggatgggacgtttcaaaagtgggccgccgtagtcgtgccatctggggaggagcaacgatatacctgccatgtgcagcacgaaggactgcccgaaccgttgatgctccgctggaaacaatccagcctgccaaccatcccaataatggggatcgttgctggattggtcgtcctggcagcagttgtgactggggctgcggtggctgctgtgctgtggcgaaagaaatcctcagattag

SEQ ID NO: 345558 - DNA, 741 bp, Artificial Sequence
  derived and/or modified sequence
atggtagttatggctccaagaactttgtttctgctgctcagcggagcactgaccctgacagagacctgggccggcagtcattctatgcgctacttctctgctgccgtgagtagacctggccgtggagagccaaggttcatcgccatgggctatgtggacgacacacagttcgtgcggttcgatagcgactcagcctgccctaggatggaaccgagagcaccctgggttgagcaggaggggccggaatactgggaagaggagacccggaatacaaaggcccacgcccaaaccgacaggatgaacttgcaaacgctcagaggctactacaatcagagcgaggccaaccccccaaaaacgcatgttacgcatcaccctgtgtttgactatgaggccacgttgagatgctgggcactcggtttctatccagcagagattatattgacctggcagagggacggggaagaccagacgcaggatgtggaattggtcgagaccaggcctgcaggcgacggtacctttcagaagtgggccgccgtcgtggtcccctcaggcgaagagcagcggtacacgtgtcacgtgcaacatgaagggctgcccgaacctttgatgctaaggtggaaacagtcatctctacctacgatcccaattatgggcatcgtggccgggctggtcgtgctggccgctgtcgtgaccggcgctgccgtagcggcagtgctctggcgcaagaaatcctcagattag

SEQ ID NO: 345559 - DNA, 465 bp, Artificial Sequence
  derived and/or modified sequence
atggtggttatggctccccgaacgctctttttgctactctcaggagccctgactctcaccgagacctgggctgggtcccatagcatgcgttacttcagcgcagccgtctcccgccctggcagaggggaacccagatttattgctatgggatatgtcgacgacacacagttcgttcggttcgattccgacagcgcgtgccccaggatggaaccgagggccccctgggttgagcaggagggtccagaatattgggaagaagagacacgcaatacaaaagcccacgcacagaccgacaggatgaacctgcagactctccgcggatactacaatcaaagtgaggccaagcagtcctcacttcccaccataccaattatgggcattgtggctgggctggtggtgctcgcggccgtcgtgaccggagccgccgtcgccgccgtcctgtggcgtaagaagtcgtctgattag

SEQ ID NO: 345560 - DNA, 741 bp, Artificial Sequence
  derived and/or modified sequence
atggtggttatggcaccccgtacacttttcctcctactttccggcgcccttacactgacagagacatgggccggcagtcactcaatgcggtacttcagcgctgccgtgtctaggcctggccgaggtgaaccgaggtttatagcaatggggtacgtggacgacacccagttcgtgcgttttgattcagactccgcctgtcctaggatggagccgagagctccttgggtcgagcaagaaggtccagaatactgggaggaagaaactcgcaatactaaagcccacgctcaaacagatagaatgaacctccagaccctgagaggctactacaaccagtccgaagccaaccctcctaaaacacacgtcacacatcaccccgtttttgactacgaagccaccctgagatgctgggctctgggcttctacccggctgaaattattctgacctggcagcgcgacggggaagatcaaacacaggacgttgaacttgttgagactaggccggccggcgacggaactttccagaagtgggcagcagtggtggtgccttccggagaggagcagagatatacttgccacgtgcagcacgaagggcttcccgaacccctgatgctccggtggaaacagagcagcctgccaacaatccccataatgggaattgtcgcaggacttgtggtcctcgcagccgtcgtgactggcgcagccgtggctgccgtgctgtggagaaagaagagctccgattag

SEQ ID NO: 345561 - DNA, 465 bp, Artificial Sequence
  derived and/or modified sequence
atggtggtgatggcgccacgaactctgttcttgctgcttagtggtgctctgactctgactgagacctgggccggatcccattctatgagatacttctcggccgcagtgtcacgccccggcagaggagagcctcgcttcattgcgatgggttacgttgatgatacacagtttgtgcgattcgactccgacagtgcctgtcctcgtatggagcctcgcgccccgtgggtcgagcaggaggggcctgaatactgggaagaagagacacgaaacacgaaggcgcatgcgcagaccgacagaatgaaccttcagactctcagaggctactataaccagtcagaggctaagcagagcagcctgccgaccatcccgatcatgggtatagtggccgggctggtcgttctggctgcggttgtgactggtgctgcagtggccgcagttctctggaggaagaagtcttctgactag

SEQ ID NO: 345562 - DNA, 741 bp, Artificial Sequence
  derived and/or modified sequence
atggtagtgatggctcctagaaccctcttcttactgctgagcggagccctgactctcacggagacgtgggcaggcagccactccatgcgatattttagtgctgccgtatcacgacctggacgcggagagccacgattcatcgcaatgggttacgttgatgacacccagttcgtgcgcttcgacagtgatagcgcctgtccccggatggaacctcgcgccccatgggtcgaacaagagggccccgaatactgggaagaggaaacacgcaatactaaagctcacgcacaaaccgatcgcatgaacttacagacacttcgcggctactacaaccagagtgaggccaaccccccaaagacacatgtgacccaccacccagtttttgattatgaagcaacactgcggtgctgggccttgggtttctaccccgcagagatcatactgacctggcagagggacggagaagaccagacacaggatgttgagctggtagagactaggcctgccggggacggaaccttccagaaatgggccgctgttgtcgtcccgagcggtgaggagcagcgttatacatgccacgtgcagcacgagggccttcccgaacccctcatgttacgctggaaacagtcctccctccccaccataccaattatggggatagtggctggtctcgttgtccttgcagcagtcgtcaccggggccgcggtagccgccgtcttgtggaggaaaaaaagttctgattag

SEQ ID NO: 345563 - DNA, 741 bp, Artificial Sequence
  derived and/or modified sequence
atggtggtcatggcccccaggactttattcttgctgctctccggagctctgacactcaccgagacgtgggccggctctcactctatgcggtacttctcagcagccgtgtccaggccggggcggggcgaaccccgttttattgccatgggctacgtggacgacacccagtttgtgagattcgattctgactctgcctgtcccagaatggaaccaagagctccttgggtggagcaagagggaccggagtattgggaagaggaaactcggaacacaaaggctcatgcacagacagaccgtatgaatctgcagacgttacgaggctattacaaccagtcagaggcgaacccacctaaaacacatgtgacacaccaccctgtgtttgattacgaagcaactctgcggtgttgggctctcgggttctatccagctgaaatcatcctgacgtggcagagagatggcgaggaccagactcaggatgtggagctggtcgaaacccggccagcgggcgatggcaccttccagaaatgggctgccgtagttgtgccctcaggggaggaacagagatacacgtgtcacgtccaacatgaagggttacccgagccgctgatgctacgctggaagcagtcttccctgcctaccatcccgattatgggcatagtggccggcctcgtggtgctggctgctgtggtgacgggcgcagccgtggcggcagtgctgtggagaaagaagtcctctgattag

SEQ ID NO: 345564 - DNA, 465 bp, Artificial Sequence
  derived and/or modified sequence
atggtagttatggcaccccgcactttatttctactcctaagtggtgctcttacactaaccgagacgtgggcaggcagccacagcatgagatactttagcgctgcagtcagtcgccccggacggggcgagcccagattcatagcaatgggctatgtggatgacacccaatttgtgcgcttcgatagtgattccgcttgccctagaatggagccccgagcgccatgggttgagcaagagggcccagagtactgggaagaggagactagaaacactaaggctcacgcacagacagaccgcatgaacttgcaaactctacgcgggtactacaaccagagtgaggccaagcaaagctctctgcccacgatacctatcatggggatcgtggcaggacttgtggtgttggccgcagtggtcacaggtgccgctgtggctgcggtgttatggaggaagaagagcagcgactag

SEQ ID NO: 345565 - DNA, 465 bp, Artificial Sequence
  derived and/or modified sequence
atggtggttatggctcctagaacactgttccttctcctgtctggggctctgacactgaccgagacctgggccggctcccactccatgagatactttagcgccgccgtttcgaggcccgggcgtggtgaaccacggttcattgcaatgggatacgtggacgacactcagtttgttcgttttgacagcgatagcgcttgcccgagaatggagcctcgggctccgtgggtggaacaggaggggcctgagtactgggaagaggagacccgtaacactaaggcccatgcacaaactgatcgcatgaatctgcaaacacttagaggctattataatcagagcgaggccaaacagtcgtctctgcctacaattccaataatggggatcgtggccgggttggtggttctggccgctgttgttaccggggccgcggtcgcagccgtactgtggcgaaaaaagagttctgactag

SEQ ID NO: 345566 - DNA, 741 bp, Artificial Sequence
  derived and/or modified sequence
atggtggtcatggcgcctagaacgctgttcttgttgctcagcggggccttgacattgaccgaaacctgggcaggcagccattccatgcggtattttagcgcagcagtgagccgccccgggcgtggagaaccacgattcattgcgatgggctatgtcgacgatacacagttcgtccggttcgattccgattctgcttgcccacgaatggagccccgcgcaccctgggtggagcaggaggggcccgagtactgggaggaggagaccagaaatacgaaggcacacgcacagaccgatcggatgaatttacagaccctcagaggctattataatcaatcagaagccaatccaccgaagacccacgtaacgcaccaccctgtgttcgactatgaagctacgttaaggtgttgggcgcttggcttctaccccgctgagattatcttaacctggcagcgagatggcgaagaccagacgcaggacgttgaactcgtagagacgaggccagcaggggatggcacattccagaaatgggcggccgtcgtggtcccctcaggggaagagcagcgttacacatgtcacgtgcagcatgaagggctgccggagcccttaatgctccggtggaagcagtctagtcttcctacaatccctataatgggcattgtcgccggattggtggttctcgctgcagtggtgactggcgccgccgtggccgctgtgctgtggcgtaaaaaatccagcgattag

SEQ ID NO: 345567 - DNA, 741 bp, Artificial Sequence
  derived and/or modified sequence
atggttgtgatggccccaaggaccctttttcttctcctctccggcgcccttaccctaactgaaacatgggccgggagtcactccatgcgatatttctcagcagccgtctccagaccggggagaggcgagccccgattcattgccatgggatatgtggatgacacccagtttgttcggttcgattcagactctgcatgcccaagaatggaaccacgagcgccatgggttgaacaggagggacctgaatattgggaggaggaaacccgaaatacaaaggctcatgcacagactgacagaatgaacctgcagaccctccggggatattacaatcagagcgaggctaatccccctaaaacccatgtaacacaccaccccgtcttcgactacgaggctactctgcggtgttgggctttggggttctaccccgcagaaataatcctgacgtggcagagagacggggaagatcagactcaggatgtcgaactcgtcgagacgcgtccggccggcgatgggacatttcagaaatgggccgctgtcgtcgtgccttctggtgaggaacaaagatatacatgccacgtgcagcatgaggggctacctgagcccctaatgcttcgttggaagcaatcctcactgccaacaatcccaattatgggcatcgtcgccggcctcgttgtactagccgcagtggtgacaggcgctgccgtggccgcagtgctctggcggaagaagagttccgattag

SEQ ID NO: 345568 - DNA, 465 bp, Artificial Sequence
  derived and/or modified sequence
atggtggtgatggcacctaggacgctgttcctcctcctgagtggtgctctgacactgacagaaacttgggcaggctctcatagtatgcggtacttttcagcggctgtctcccggcctggccggggtgaacctcgattcattgctatgggctacgtcgacgatacccagtttgtcagattcgactccgactctgcttgcccacgtatggagccccgagcaccttgggtggaacaagagggtcccgaatattgggaggaggagactcgcaacaccaaagcacacgcacagacagatagaatgaaccttcagaccctccgcggatactacaaccaaagcgaggcgaaacagtcgagcttacccaccatcccaataatgggcatcgtggcagggctggtggtgttggccgcagttgtcaccggcgccgcggtcgccgccgtgctgtggcgcaagaagagttctgactag

SEQ ID NO: 345569 - DNA, 741 bp, Artificial Sequence
  derived and/or modified sequence
atggtagtcatggccccacggaccttattcctgctactttcaggcgccctcacattgaccgaaacatgggctggatcacatagtatgcgttacttcagcgccgctgttagtaggcctggtcgaggggaacccaggttcatcgccatgggctacgtagatgatacccagttcgttcgatttgattcggattccgcctgtccgcgcatggaacctcgagccccctgggtcgagcaagagggtcccgaatattgggaagaggagacaagaaacactaaagcgcacgcccagacagaccggatgaacctgcagacccttcgggggtattacaaccagtctgaggcgaacccccctaaaactcacgttacccaccaccccgtattcgactacgaggccactctgcgttgctgggcactgggcttttacccagccgagattattctcacctggcaaagggacggtgaggaccagactcaggacgttgagcttgtggagacccggcccgcaggagatggaactttccagaaatgggccgccgtagttgtgcctagtggcgaggagcagaggtatacgtgccacgttcagcacgaaggcctacccgagccactgatgcttcggtggaagcagagctccctgccaaccattcctattatggggatagttgcaggactcgtggttctggcagcagtagtaacaggtgctgctgtggcggctgtgttatggaggaagaagtctagcgactag

SEQ ID NO: 345570 - DNA, 741 bp, Artificial Sequence
  derived and/or modified sequence
atggtcgtaatggcgccgcggacactgtttctgctgttgagcggcgctttgaccctgaccgaaacttgggccggttctcactctatgcggtatttttctgccgcagtctctcggcccggcaggggtgaaccaagattcattgccatgggttacgttgatgatactcagtttgtacgtttcgattccgactcagcctgtccccggatggaaccaagagcaccatgggtggaacaggaaggcccggagtattgggaggaggagacgaggaataccaaggcccacgctcagaccgatcgcatgaacttgcagacgctgagagggtactataatcagtccgaggccaacccaccaaagacccacgtgacccatcatcccgtgttcgactatgaggcaactctccgatgttgggctctgggattttaccctgccgaaattatccttacctggcaaagggatggtgaggaccagactcaggacgtcgaattggtggaaaccagacctgccggggacggcacattccagaagtgggccgccgtggtagtaccatcaggcgaagaacagcgctacacgtgccatgtgcagcacgagggcctgcctgaacctttaatgttgagatggaaacagtcgtccctccctactattcctattatgggcattgtcgcaggattggtggtgcttgctgcagttgtcacaggggctgctgtcgctgcagtgttatggagaaagaagtcttccgattag

SEQ ID NO: 345571 - DNA, 741 bp, Artificial Sequence
  derived and/or modified sequence
atggtagttatggcacctaggacactctttctgctcctttcaggtgcacttactctcaccgaaacatgggccggcagtcactcaatgagatactttagcgcagccgtttcaagacctggtcggggcgagccgagattcattgcaatgggttacgtagacgatacccaatttgtgaggttcgacagcgactcagcttgtccaaggatggagcctagggctccctgggtggagcaagaaggtccggaatattgggaagaagaaacaagaaatactaaggcccatgcccagaccgatagaatgaaccttcagactctcaggggttactacaatcaatcagaggccaacccacctaaaactcatgtaacacaccatcccgttttcgactatgaagccacgctgcgatgttgggccctgggcttttatcccgccgagattattctgacctggcagcgggacggcgaagaccagacccaagatgtggaactcgtggagactcgcccggctggggacggaaccttccaaaaatgggcggcagtagtggtgccgtctggggaggagcagagatacacatgccacgtgcaacacgagggcctaccagagcccctgatgctccggtggaaacaaagttccctgcccaccatccctatcatgggcatagttgctgggctggtagttctggctgcagtcgttacaggcgctgcagtggcggcggtgctttggaggaagaaaagctctgattag

SEQ ID NO: 345572 - DNA, 741 bp, Artificial Sequence
  derived and/or modified sequence
atggtggtcatggcccctcgtacactatttttacttctgtctggcgctctgaccctgaccgaaacttgggcaggaagtcatagtatgcgatacttcagcgccgctgtgtcacgccccgggagaggcgagccaaggttcatagccatggggtacgtggatgatacacaatttgttagattcgactctgattctgcctgtcctcggatggagcctcgggcaccctgggtggaacaggaaggaccagagtactgggaggaagagacacgaaacaccaaggcccacgctcagactgaccggatgaacctccagacccttcgggggtattacaaccagtccgaggctaatcctcctaagacgcacgtgactcaccaccctgtgttcgactacgaggccaccctccgttgttgggcgcttggcttttaccccgctgaaatcattctgacgtggcagagggacggagaagaccagacccaagacgtggaactagtggaaactaggcccgccggcgacggaacatttcagaaatgggcggcggtggttgtaccgagcggcgaggaacagcgctatacttgccatgtccagcacgagggcctgcccgaaccattaatgcttaggtggaaacaaagttcattgcccaccattcccatcatggggatcgttgctggtctagtggtgcttgccgcagtggtaaccggcgctgccgtggcagccgtcttatggaggaagaaatcctcagactag

SEQ ID NO: 345573 - DNA, 741 bp, Artificial Sequence
  derived and/or modified sequence
atggttgtgatggcccccagaactctgtttctgctgttaagcggcgccctgacgttgactgagacttgggcaggatcccacagtatgcgttacttctcagcggcagtctcccggccggggcggggtgagcctcggtttatcgccatgggatacgttgacgatacacaatttgtccgattcgactccgattcagcctgtccccggatggagccccgagcaccctgggtggagcaagagggacccgaatactgggaggaagaaactaggaacacaaaggcacatgctcagactgacaggatgaacctgcaaaccctgagaggttattacaaccagtctgaagccaatccccctaaaacccacgtgactcatcaccctgtcttcgactacgaggccacattgagatgctgggccctcggcttttacccagcggaaattattctaacatggcagcgggacggggaagatcagacccaagatgtggagctggttgaaactagaccagccggcgatggaacttttcagaaatgggctgccgtggtcgtgcctagcggtgaggaacagcggtacacatgtcatgttcaacacgaaggccttcccgagccactgatgcttaggtggaagcagagtagcctgcccacgataccaataatgggaatagtggccggtctggtggtgttagctgccgtcgtgacgggcgcagctgtggccgccgtcctatggaggaagaaatcgtccgactag

SEQ ID NO: 345574 - DNA, 741 bp, Artificial Sequence
  derived and/or modified sequence
atggtggtgatggcccctcgtactctctttcttctgctgtcgggagcattgactcttaccgagacctgggcaggaagtcattctatgcgctacttctccgccgccgtgagtaggccaggccgcggcgagccacgtttcatcgccatgggctacgttgatgatacacaattcgtgcgatttgattcagactcagcctgccctagaatggagccccgagctccttgggtagaacaggaaggtcccgagtattgggaagaggagacaaggaatacaaaagctcatgctcagacggatagaatgaatctccagaccctgagggggtattataaccaatccgaagccaatcccccaaagactcacgtaactcaccacccagtgtttgattatgaagccaccttgcggtgctgggcactcggcttttacccggccgagattatccttacctggcagagagatggagaagatcagacccaggatgtagagctggtcgaaacccgcccagcgggcgacgggactttccagaaatgggcagcagtggtggtgccttccggcgaggaacagaggtatacatgccatgtgcagcacgaggggctgccagaacctctgatgttgaggtggaagcagtctagcctgcctacaatccctattatgggaatcgtggcaggcctggtggtcctggccgcagtggtcacaggagccgcggttgccgccgtattatggcgcaagaagagctctgattag

SEQ ID NO: 345575 - DNA, 2295 bp, Artificial Sequence
  derived and/or modified sequence
cccagacgcggaggttggggtcatggcgccccgaagcctcctcctgctgctctcaggggccctggccctgaccgatacttgggcgggctcccactccttgaggtatttcagcaccgctgtgtcgcggcccggccgcggggagccccgctacatcgccgtggagtacgtagacgacacgcaattcctgcggttcgacagcgacgccgcgattccgaggatggagccgcgggagccgtgggtggagcaagaggggccgcagtattgggagtggaccacagggtacgccaaggccaacgcacagactgaccgagtggccctgaggaacctgctccgcagatacttggagaatgggaaggagacgctacagcgcgcagatcctccaaaggcacacgttgcccaccaccccatctctgaccatgaggccaccctgaggtgctgggccctgggcttctaccctgcggagatcacgctgacctggcagcgggatggggaggaacagacccaggacacagagcttgtggagaccaggcctgcaggggatggaaccttccagaagtgggccgctgtggtggtgcctcctggagaggaacagagatacacatgccatgtgcagcacgaggggctgccccagcccctcatcctgagatgggagcagtctccccagcccaccatccccatcgtgggcatcgttgctggccttgttgtccttggagctgtggtcactggagctgtggtcgctgctgtgatgtggaggaagaagagctcagatagaaacagagggagctactctcaggctgcagcctactcagtggtcagcggaaacttgatgataacatggtggtcaagcttatttctcctgggggtgctcttccaaggatatttgggctgcctccggagtcacagtgtcttgggccgccggaaggcccagctcctgagtgtctctacctctcaaacaagtattctcatccaggagcaattttcccaccagaggacattagctatgtctggaaaaatgttttgttgccatgactggagtgaggaggaggtgctaccagcatcttgtggggaatgaccagggatgctgaacatcctgcagtgcacaagtcagcccaatcacccacataacagataattatccagccccaataccaagattgccaagggtaaggaggcctgccaggactttctctcccttgagtacaagcttccttgaactgagggacaccctgaaggaaaagtgtggtcccaccccagtcatctctcccttccctggagctccatctgtatgcctgtagtgcttaggcctgtaacctggggtccaggaacccaccttcccatgagactgcatgcagaagtgatgatatgtgcacacatgacttcattacagggcattggatgttgatattcatcaggtcagctggggcccaagacactactcttctgccaacaggccgcaatcctctgcattagagagagggtaaagattgagggaggccctaacttcaaaccttctatcactgctagtgaagtgccaaaaagaagtgcaaggtcatctgcccttgtaggaaccacacaggaaggcagagtgtccaccaatgtcaaattccatcaaagaaataatattttgacaaaaaatgcaagtcacctttctaagtcccagacagcagctcaaaataaaaagcattaaacccctcaaatcttagaccaggtgaaattattgaagctgcagtaaggtcttgtgggacctgcagttagagagaagggacaactcaatttgggactgcagcagaaacccctacatcatggggttcctggaagggaccctctcccttcagcgacgcattgtgaggccatttctaggtaaaaaggtagaatttccttggattcctgaggtttattttacacttactgcttattctttgactttatagaagccaacttcagtttgaacatcttgcaattaattttttttggctctaagtggagaatttgaacttgtttctgaagaaaaccaggggctccttatgtgagcaagcaaccctccctgtggcccccttatgcaataaacataagccattgtgagccagcaaaatttaaagcaaggaaagcagtaaaccctccatttcagcatgtttcagcctgtctagtgatgttctagtcttgcctcactcttaacattttaaaatttataattttatttgattttgatttaataagaattcatatgtattcatttcttttgggtttgtcaccaaaagcctcctccaatcacctgtggagtaaagacaagtaaat

SEQ ID NO: 345576 - DNA, 2295 bp, Artificial Sequence
  derived and/or modified sequence
cccagacgcggaggttggggtcatggcgccccgaagcctcctcctgctgctctcaggggccctggccctgaccgatacttgggcgggctcccactccttgaggtatttcagcaccgctgtgtcgcggcccggccgcggggagccccgctacatcgccgtggagtacgtagacgacacgcaattcctgcggttcgacagcgacgccgcgattccgaggatggagccgcgggagccgtgggtggagcaagaggggccgcagtattgggagtggaccacagggtacgccaaggccaacgcacagactgaccgagtggccctgaggaacctgctccgcagatacttggagaatgggaaggagacgctacagcgcgcagatcctccaaaggcacacgttgcccaccaccccatctctgaccatgaggccaccctgaggtgctgggccctgggcttctaccctgcggagatcacgctgacctggcagcgggatggggaggaacagacccaggacacagagcttgtggagaccaggcctgcaggggatggaaccttccagaagtgggccgctgtggtggtgccttctggagaggaacagagatacacatgccatgtgcagcacgaggggctgccccagcccctcatcctgagatgggagcagtctccccagcccaccatccccatcgtgggcatcgttgctggccttgttgtccttggagctgtggtcactggagctgtggtcgctgctgtgatgtggaggaagaagagctcagatagaaacagagggagctactctcaggctgcagcctactcagtggtcagcggaaacttgatgataacatggtggtcaagcttatttctcctgggggtgctcttccaaggatatttgggctgcctccggagtcacagtgtcttgggccgccggaaggcccagctcctgagtgtctctacctctcaaacaagtattctcatccaggagcaattttcccaccagaggacattagctatgtctggaaaaatgttttgttgccatgactggagtgaggagaaggtgctaccagcatcttgtggggaatgaccagggatgctgaacatcctgcagtgcacaagtcagcccaatcacccacataacagataattatccagccccaataccaagattgccaagggtaaggaggcctgccaggactttctctcccttgagtacaagcttccttgaactgagggacaccctgaaggaaaagtgtggtcccaccccagtcatctctcccttccctggagctccatctgtatgcctgtagtgcttaggcctgtaacctggggtccaggaacccaccttcccatgagactgcatgcagaagtgatgatatgtgcacacatgacttcattacagggcattggatattgatattcatcaggtcagctggggcccaagacactactcttctgccaacaggccgcaatcctctgcattagagagagggtaaagattgagggaggccctaacttcaaaccttctatcactgctagtgaagtgccaaaaagaagtgcaaggtcatctgcccttgtaggaaccacacaggaaggcagagtgtccaccaatgtcaaattccatcaaagaaataatattttgacaaaaaatgcaagtcacctttctaagtcccagacagcagctcaaaataaaaagcattaaacccctcaaatcttagaccaggtgaaattattgaagctgcagtaaggtcttgtgggacctgcagttagagagaagggacaactcaatttgggactgcagcagaaacccctacatcatggggttcctggaagggaccctctcccttcagcgacgcattgtgaggccatttctaggtaaaaaggtagaatttccttggattcctgaggtttattttacacttactgcttattctttgactttatagaagccaacttcagtttgaacatcttgcaattaattttttttggctctaagtggagaatttgaacttgtttctgaagaaaaccaggggctccttatgtgagcaagcaaccctccctgtggcccccttatgcaataaacataagccattgtgagccagcaaaatttaaagcaaggaaagcagtaaaccctccatttcagcatgtttcagcctgtctagtgatgttctagtcttgcctcactcttaacattttaaaatttataattttatttgattttgatttaataagaattcatatgtattcatttcttttgggtttgtcaccaaaagcctcctccaatcacctgtggagtaaagacaagtaaat

SEQ ID NO: 345577 - DNA, 2295 bp, Artificial Sequence
  derived and/or modified sequence
cccagacgcggaggttggggtcatggcgccccgaagcctcctcctgctgctctcaggggccctggccctgaccgatacttgggcgggctcccactccttgaggtatttcagcaccgctgtgtcgcggcccggccgcggggagccccgctacatcgccgtggagtacgtagacgacacgcaattcctgcggttcgacagcgacgccgcgattccgaggatggagccgcgggagccgtgggtggagcaagaggggccgcagtattgggagtggaccacagggtacgccaaggccaacgcacagactgaccgagtggccctgaggaacctgctccgcagatacttggagaatgggaaggagacgctacagcgcgcagatcctccaaaggcacacgttgcccaccaccccatctctgaccatgaggccaccctgaggtgctgggccctgggcttctaccctgcggagatcacgctgacctggcagcgggatggggaggaacagacccaggacacagagcttgtggagaccaggcctgcaggggatggaaccttccagaagtgggccgctgtggtggtgccttctggagaggaacagagatacacatgccatgtgcagcacgaggggctgccccagcccctcatcctgagatgggagcagtctccccagcccaccatccccatcgtgggcatcgttgctggccttgttgtccttggagctgtggtcactggagctgtggtcgctgctgtgatgtggaggaagaagagctcagatagaaacagagggagctactctcaggctgcagcctactcagtggtcagcggaaacttgatgataacatggtggtcaagcttatttctcctgggggtgctcttccaaggatatttgggctgcctccggagtcacagtgtcttgggccgccggaaggcccagctcctgagtgtctctacctctcaaacaagtattctcatccaggagcaattttcccaccagaggacattagctatgtctggaaaaatgttttgttgccatgactggagtgaggaggaggtgctaccagcatcttgtggggaatgaccagggatgctgaacatcctgcagtgcacaagtcagcccaatcacccacataacagataattatccagccccaataccaagattgccaagggtaaggaggcctgccaggactttctctcccttgagtacaagcttccttgaactgagggacaccctgaaggaaaagtgtggtcccaccccagtcatctctcccttccctggagctccatctgtatgcctgtagtgcttaggcctgtaacctggggtccaggaacccaccttcccatgagactgcatgcagaagtgatgatatgtgcacacatgacttcattacagggcattggatattgatattcatcaggtcagctggggcccaagacactactcttctgccaacaggccgcaatcctctgcattagagagagggtaaagattgagggaggccctaacttcaaaccttctatcactgctagtgaagtgccaaaaagaagtgcaaggtcatctgcccttgtaggaaccacacaggaaggcagagtgtccaccaatgtcaaattccatcaaagaaataatattttgacaaaaaatgcaagtcacctttctaagtcccagacagcagctcaaaataaaaagcattaaacccctcaaatcttagaccaggtgaaattattgaagctgcagtaaggtcttgtgggacctgcagttagagagaagggacaactcaatttgggactgcagcagaaacccctacatcatggggttcctggaagggaccctctcccttcagcgacgcattacgaggccatttctaggtaaaaaggtagaatttccttggattcctgaggtttattttacacttactgcttattctttgactttatagaagccaacttcagtttgaacatcttgcaattaattttttttggctctaagtggagaatttgaacttgtttctgaagaaaaccaggggctccttatgtgagcaagcaaccttccctgtggcccccttatgcaataaacataagccattgtgagccagcaaaatttaaagcaaggaaagcagtaaaccctccatttcagcatgtttcagcctgtctagtgatgttctagtcttgcctcactcttaacattttaaaatttataattttatttgattttgatttaataagaattcatatgtattcatttcttttgggtttgtcaccaaaagcctcctccaatcacctgtggagtaaagacaagtaaat

SEQ ID NO: 345578 - DNA, 851 bp, Artificial Sequence
  derived and/or modified sequence
atggtggtcatggcgccccgaaccctcttcctgctgctctcgggggccctgaccctgaccgagacctgggcgggctcccactccatgaggtatttcagcgccgccgtgtcccggcccggccgcggggagccccgcttcatcgccatgggctacgtggacgacacgcagttcgtgcggttcgacagcgactcggcgtgtccgaggatggagccgcgggcgccgtgggtggagcaggaggggccggagtattgggaagaggagacacggaacaccaaggcccacgcacagactgacagaatgaacctgcagaccctgcgcggctactacaaccagagcgaggccaagcagtcttccctgcccaccatccccatcatgggtatcgttgctggcctggttgtccttgcagctgtagtcactggagctgcggtcgctgctgtgctgtggagaaagaagagctcagattgaaaaggagggagctactctcaggctgcaatgtgaaacagctgccctgtgtgggactgagtggcaagtccctttgtgacttcaagaaccctgactcctctttgtgcagagaccagcccacccctgtgcccaccatgaccctcttcctcatgctgaactgcattccttccccaatcacctttcctgttccagaaaaggggctgggatgtctccgtctctgtctcaaatttgtggtccactgagctataacttacttctgtattaaaattagaatctgagtataaatttactttttcaaattatttccaagagagattgatgggttaattaaaggagaagattcctgaaatttgagagacaaaataaatggaagacatgagaactttcca

SEQ ID NO: 345579 - DNA, 1127 bp, Artificial Sequence
  derived and/or modified sequence
atggtggtcatggcgccccgaaccctcttcctgctgctctcgggggccctgaccctgaccgagacctgggcgggctcccactccatgaggtatttcagcgccgccgtgtcccggcccggccgcggggagccccgcttcatcgccatgggctacgtggacgacacgcagttcgtgcggttcgacagcgactcggcgtgtccgaggatggagccgcgggcgccgtgggtggagcaggaggggccggagtattgggaagaggagacacggaacaccaaggcccacgcacagactgacagaatgaacctgcagaccctgcgcggctactacaaccagagcgaggccaacccccccaagacacacgtgacccaccaccctgtctttgactatgaggccaccctgaggtgctgggccctgggcttctaccctgcggagatcatactgacctggcagcgggatggggaggaccagacccaggacgtggagctcgtggagaccaggcctgcaggggatggaaccttccagaagtgggcagctgtggtggtgccttctggagaggagcagagatacacgtgccatgtgcagcatgaggggctgccggagcccctcatgctgagatggaagcagtcttccctgcccaccatccccatcatgggtatcgttgctggcctggttgtccttgcagctgtagtcactggagctgcggtcgctgctgtgctgtggagaaagaagagctcagattgaaaaggagggagctactctcaggctgcaatgtgaaacagctgccctgtgtgggactgagtggcaagtccctttgtgacttcaagaaccctgactcctctttgtgcagagaccagcccacccctgtgcccaccatgaccctcttcctcatgctgaactgcattccttccccaatcacctttcctgttccagaaaaggggctgggatgtctccgtctctgtctcaaatttgtggtccactgagctataacttacttctgtattaaaattagaatctgagtataaatttactttttcaaattatttccaagagagattgatgggttaattaaaggagaagattcctgaaatttgagagacaaaataaatggaagacatgagaactttcca

SEQ ID NO: 345580 - DNA, 867 bp, Artificial Sequence
  derived and/or modified sequence
atggtggtcatggcaccccgaaccctcttcctgctactctcgggggccctgaccctgaccgagacctgggcgggctcccactccatgaggtatttcagcgccgccgtgtcccggcccggccgcggggagccccgcttcatcgccatgggctacgtggacgacacgcagttcgtgcggttcgacagcgactcggcgtgtccgaggatggagccgcgggcgccgtgggtggagcaggaggggccagagtattgggaagaggagacacggaacaccaaggcccacgcacagactgacagaatgaacctgcagaccctgcgcggctactacaaccagagcgaggccaagcagtcttccctgcccaccatccccatcatgggtatcgttgctggtctggttgtccttgcagctgtagtcactggagctgcggtcgctgctgtgctgtggaggaagaagagctcagattgaaaaggagggagctactctcaggctgcaatgtgaaacagctgccctgtgtgggactgagtggcaagatttgttcatgccttccctttgtgacttcaagaaccctgacttctctttctgcagagaccagcccacccctgtgcccaccatgaccctcttcctcatgctgaactgcattccttccccaatcacctttcctgttccagaaaaggggctgggatgtctccgtctctgtctcaaatttgtggtgcactgagctataacttacttctgtattaaaattagaatctgagtataaatttagtttttcaaattatttccaagagagattgatgggttaattaaaggagaagattcctgaaatttgagagacaaaataaatggaagacatgagaactttccaca

SEQ ID NO: 345581 - DNA, 1143 bp, Artificial Sequence
  derived and/or modified sequence
atggtggtcatggcaccccgaaccctcttcctgctactctcgggggccctgaccctgaccgagacctgggcgggctcccactccatgaggtatttcagcgccgccgtgtcccggcccggccgcggggagccccgcttcatcgccatgggctacgtggacgacacgcagttcgtgcggttcgacagcgactcggcgtgtccgaggatggagccgcgggcgccgtgggtggagcaggaggggccagagtattgggaagaggagacacggaacaccaaggcccacgcacagactgacagaatgaacctgcagaccctgcgcggctactacaaccagagcgaggccaacccccccaagacacacgtgacccaccaccctgtctttgactatgaggccaccctgaggtgctgggccctgggcttctaccctgcggagatcatactgacctggcagcgggatggggaggaccagacccaggacgtggagctcgtggagaccaggcctgcaggggatggaaccttccagaagtgggcagctgtggtggtgccttctggagaggagcagagatacacgtgccatgtgcagcatgaggggctgccggagcccctcatgctgagatggaagcagtcttccctgcccaccatccccatcatgggtatcgttgctggtctggttgtccttgcagctgtagtcactggagctgcggtcgctgctgtgctgtggaggaagaagagctcagattgaaaaggagggagctactctcaggctgcaatgtgaaacagctgccctgtgtgggactgagtggcaagatttgttcatgccttccctttgtgacttcaagaaccctgacttctctttctgcagagaccagcccacccctgtgcccaccatgaccctcttcctcatgctgaactgcattccttccccaatcacctttcctgttccagaaaaggggctgggatgtctccgtctctgtctcaaatttgtggtgcactgagctataacttacttctgtattaaaattagaatctgagtataaatttagtttttcaaattatttccaagagagattgatgggttaattaaaggagaagattcctgaaatttgagagacaaaataaatggaagacatgagaactttccaca

SEQ ID NO: 345582 - DNA, 1127 bp, Artificial Sequence
  derived and/or modified sequence
atggtggtcatggcgccccgaaccctcttcctgctgctctcgggggccctgaccctgaccgagacctgggcgggctcccactccatgaggtatttcagcgccgccgtgtcccggcccggccgcggggagccccgcttcatcgccatgggctacgtggacgacacgcagttcgtgcggttcgacagcgactcggcgtgtccgaggatggagccgcgggcgccgtgggtggagcaggaggggccggagtattgggaagaggagacacggaacaccaaggcccacgcacagactgacagaatgaacctgcagaccctgcgcggctactacaaccagagcgaggccaacccccccaagacacacgtgacccaccaccctgtctttgactatgaggccaccctgaggtgctgggccctgggcttctaccctgcggagatcatactgacctggcagcgggatggggaggaccagacccaggacgtggagctcgtggagaccaggcctgcaggggatggaaccttccagaagtgggcagctgtggtggtgccttctggagaggagcagagatacacgtgccatgtgcagcatgaggggctgccggagcccctcatgctgagatggaagcagtcttccctgcccaccatccccatcatgggtatcgttgctggcctggttgtccttgcagctgtagtcactggagctgcggtcgctgctgtgctgtggagaaagaagagctcagattgaaaaggagggagctactctcaggctgcaatgtgaaacagctgccctgtgtgggactgagtggcaagtccctttgtgacttcaagaaccctgacttctctttgtgcagagaccagcccacccctgtgcccaccatgaccctcttcctcatgctgaactgcattccttccccaatcacctttcctgttccagaaaaggggctgggatgtctccgtctctgtctcaaatttgtggtccactgagctataacttacttctgtattaaaattagaatctgagtgtaaatttactttttcaaattatttccaagagagattgatgggttaattaaaggagaagattcctgaaatttgagagacaaaataaatggaagacatgagaactttcca

SEQ ID NO: 345583 - DNA, 851 bp, Artificial Sequence
  derived and/or modified sequence
atggtggtcatggcgccccgaaccctcttcctgctgctctcgggggccctgaccctgaccgagacctgggcgggctcccactccatgaggtatttcagcgccgccgtgtcccggcccggccgcggggagccccgcttcatcgccatgggctacgtggacgacacgcagttcgtgcggttcgacagcgactcggcgtgtccgaggatggagccgcgggcgccgtgggtggagcaggaggggccggagtattgggaagaggagacacggaacaccaaggcccacgcacagactgacagaatgaacctgcagaccctgcgcggctactacaaccagagcgaggccaagcagtcttccctgcccaccatccccatcatgggtatcgttgctggcctggttgtccttgcagctgtagtcactggagctgcggtcgctgctgtgctgtggagaaagaagagctcagattgaaaaggagggagctactctcaggctgcaatgtgaaacagctgccctgtgtgggactgagtggcaagtccctttgtgacttcaagaaccctgacttctctttgtgcagagaccagcccacccctgtgcccaccatgaccctcttcctcatgctgaactgcattccttccccaatcacctttcctgttccagaaaaggggctgggatgtctccgtctctgtctcaaatttgtggtccactgagctataacttacttctgtattaaaattagaatctgagtgtaaatttactttttcaaattatttccaagagagattgatgggttaattaaaggagaagattcctgaaatttgagagacaaaataaatggaagacatgagaactttcca

SEQ ID NO: 345584 - DNA, 1127 bp, Artificial Sequence
  derived and/or modified sequence
atggtggtcatggcgccccgaaccctcttcctgctgctctcgggggccctgaccctgaccgagacctgggcgggctcccactccatgaggtatttcagcgccgccgtgtcccggcccggccgcggggagccccgcttcatcgccatgggctacgtggacgacacgcagttcgtgcggttcgacagcgactcggcgtgtccgaggatggagccgcgggcgccgtgggtggagcaggaggggccggagtattgggaagaggagacacggaacaccaaggcccacgcacagactgacagaatgaacctgcagaccctgcgcggctactacaaccagagcgaggccaacccccccaagacacacgtgacccaccaccctgtctttgactatgaggccaccctgaggtgctgggccctgggcttctaccctgcggagatcatactgacctggcagcgggatggggaggaccagacccaggacgtggagctcgtggagaccaggcctgcaggggatggaaccttccagaagtgggcagctgtggtggtgccttctggagaggagcagagatacacgtgccatgtgcagcatgaggggctgccggagcccctcatgctgagatggaagcagtcttccctgcccaccatccccatcatgggtatcgttgctggcctggttgtccttgcagctgtagtcactggagctgcggtcgctgctgtgctgtggagaaagaagagctcagattgaaaaggagggagctactctcaggctgcaatgtgaaacagctgccctgtgtgggactgagtggcaagtccctttgtgacttcaagaaccctgacttctctttgtgcagagaccagcccacccctgtgcccaccatgaccctcttcctcatgctgaactgcattccttccccaatcacctttcctgttccagaaaaggggctgggatgtctccgtctctgtctcaaatttgtggtccactgagctataacttacttctgtattaaaattagaatctgagtataaatttactttttcaaattatttccaagagagattgataggttaattaaaggagaagattcctgaaatttgagagacaaaataaatggaagacatgagaactttcca

SEQ ID NO: 345585 - DNA, 851 bp, Artificial Sequence
  derived and/or modified sequence
atggtggtcatggcgccccgaaccctcttcctgctgctctcgggggccctgaccctgaccgagacctgggcgggctcccactccatgaggtatttcagcgccgccgtgtcccggcccggccgcggggagccccgcttcatcgccatgggctacgtggacgacacgcagttcgtgcggttcgacagcgactcggcgtgtccgaggatggagccgcgggcgccgtgggtggagcaggaggggccggagtattgggaagaggagacacggaacaccaaggcccacgcacagactgacagaatgaacctgcagaccctgcgcggctactacaaccagagcgaggccaagcagtcttccctgcccaccatccccatcatgggtatcgttgctggcctggttgtccttgcagctgtagtcactggagctgcggtcgctgctgtgctgtggagaaagaagagctcagattgaaaaggagggagctactctcaggctgcaatgtgaaacagctgccctgtgtgggactgagtggcaagtccctttgtgacttcaagaaccctgacttctctttgtgcagagaccagcccacccctgtgcccaccatgaccctcttcctcatgctgaactgcattccttccccaatcacctttcctgttccagaaaaggggctgggatgtctccgtctctgtctcaaatttgtggtccactgagctataacttacttctgtattaaaattagaatctgagtataaatttactttttcaaattatttccaagagagattgataggttaattaaaggagaagattcctgaaatttgagagacaaaataaatggaagacatgagaactttcca

SEQ ID NO: 345586 - DNA, 1189 bp, Artificial Sequence
  derived and/or modified sequence
atggtggtcatggcaccccgaaccctcttcctgctactctcgggggccctgaccctgaccgagacctgggcgggctcccactccatgaggtatttcagcgccgccgtgtcccggcccggccgcggggagccccgcttcatcgccatgggctacgtggacgacacgcagttcgtgcggttcgacagcgactcggcttgtccgaggatggagccgcgggcgccgtgggtggagcaggaggggccagagtattgggaagaggagacacggaacaccaaggcccacgcacagactgacagaatgaacctgcagaccctgcgcggctactacaaccagagcgaggccaacccccccaagacacacgtgacccaccaccctgtctttgactatgaggccaccctgaggtgctgggccctgggcttctaccctgcggagatcatactgacctggcagcgggatggggaggaccagacccaggacgtggagctcgtggagaccaggcctgcaggggatggaaccttccagaagtgggcagctgtggtggtgccttctggagaggagcagagatacacgtgccatgtgcagcatgaggggctgccggagcccctcatgctgagatggaagcagtcttccctgcccaccatccccatcatgggtatcgttgctggcctggttgtccttgcagctgtagtcactggagctgcggtcgctgctgtgctgtggaggaagaagagctcagattgaaaaggagggagctactctcaggctgcaagcagtgacagtgcccagggctctaatgtgtctctcacggcttgtaaattgtgaaacagctgccctgtgtgggactgagtggcaagatttgttcatgccttccctttgtgacttcaagaaccctgacttctctttctgcagagaccagcccacccctgtgcccaccatgaccctcttcctcatgctgaactgcattccttccccaatcacctttcctgttccagaaaaggggctgggatgtctccgtctctgtctcaaatttgtggtgcactgagctataacttacttctgtattaaaattagaatctgagtataaatttagtttttcaaattatttccaagagagattgatgggttaattaaaggagaagattcctgaaatttgagagacaaaataaatggaagacatgagaactttcca

SEQ ID NO: 345587 - DNA, 1141 bp, Artificial Sequence
  derived and/or modified sequence
atggtggtcatggcaccccgaaccctcttcctgctactctcgggggccctgaccctgaccgagacctgggcgggctcccactccatgaggtatttcagcgccgccgtgtcccggcccggccgcggggagccccgcttcatcgccatgggctacgtggacgacacgcagttcgtgcggttcgacagcgactcggcttgtccgaggatggagccgcgggcgccgtgggtggagcaggaggggccagagtattgggaagaggagacacggaacaccaaggcccacgcacagactgacagaatgaacctgcagaccctgcgcggctactacaaccagagcgaggccaacccccccaagacacacgtgacccaccaccctgtctttgactatgaggccaccctgaggtgctgggccctgggcttctaccctgcggagatcatactgacctggcagcgggatggggaggaccagacccaggacgtggagctcgtggagaccaggcctgcaggggatggaaccttccagaagtgggcagctgtggtggtgccttctggagaggagcagagatacacgtgccatgtgcagcatgaggggctgccggagcccctcatgctgagatggaagcagtcttccctgcccaccatccccatcatgggtatcgttgctggcctggttgtccttgcagctgtagtcactggagctgcggtcgctgctgtgctgtggaggaagaagagctcagattgaaaaggagggagctactctcaggctgcaatgtgaaacagctgccctgtgtgggactgagtggcaagatttgttcatgccttccctttgtgacttcaagaaccctgacttctctttctgcagagaccagcccacccctgtgcccaccatgaccctcttcctcatgctgaactgcattccttccccaatcacctttcctgttccagaaaaggggctgggatgtctccgtctctgtctcaaatttgtggtgcactgagctataacttacttctgtattaaaattagaatctgagtataaatttagtttttcaaattatttccaagagagattgatgggttaattaaaggagaagattcctgaaatttgagagacaaaataaatggaagacatgagaactttcca

SEQ ID NO: 345588 - DNA, 858 bp, Artificial Sequence
  derived and/or modified sequence
atggtggtcatggcaccccgaaccctcttcctgctactctcgggggccctgaccctgaccgagacctgggcgggctcccactccatgaggtatttcagcgccgccgtgtcccggcccggccgcggggagccccgcttcatcgccatgggctacgtggacgacacgcagttcgtgcggttcgacagcgactcggcgtgtccgaggatggagccgcgggcgccgtgggtggagcaggaggggccagagtattgggaagaggagacacggaacaccaaggcccacgcacagactgacagaatgaacctgcagaccctgcgcggctactacaaccagagcgaggccaagcagtcttccctgcccaccatccccatcatgggtatcgttgctggtctggttgtccttgcagctgtagtcactggagctgcggtcgctgctgtgctgtggaggaagaagagctcagattgaaaaggagggagctactctcaggctgcaatgtgaaacagctgccctgtgtgggactgagtggcaagatttgttcatgccttccctttgtgacttcaagaaccctgacttctctttctgcagagaccagcccacccctgtgcccaccatgaccctcttcctcatgctgaactgcattccttccccaatcacctttcctgttccagaaaaggggctgggatgtctccgtctctgtctcaaatttgtggtgcactgagctataacttacttctgtattaaaattagaatctgagtataaatttagtttttcaaattatttccaagagagattgatgggttaattaaaggagaagattcctgaaatttgagagacaaaataaatggaagacatgagaa

SEQ ID NO: 345589 - DNA, 865 bp, Artificial Sequence
  derived and/or modified sequence
atggtggtcatggcaccccgaaccctcttcctgctactctcgggggccctgaccctgaccgagacctgggcgggctcccactccatgaggtatttcagcgccgccgtgtcccggcccggccgcggggagccccgcttcatcgccatgggctacgtggacgacacgcagttcgtgcggttcgacagcgactcggcttgtccgaggatggagccgcgggcgccgtgggtggagcaggaggggccagagtattgggaagaggagacacggaacaccaaggcccacgcacagactgacagaatgaacctgcagaccctgcgcggctactacaaccagagcgaggccaagcagtcttccctgcccaccatccccatcatgggtatcgttgctggcctggttgtccttgcagctgtagtcactggagctgcggtcgctgctgtgctgtggaggaagaagagctcagattgaaaaggagggagctactctcaggctgcaatgtgaaacagctgccctgtgtgggactgagtggcaagatttgttcatgccttccctttgtgacttcaagaaccctgacttctctttctgcagagaccagcccacccctgtgcccaccatgaccctcttcctcatgctgaactgcattccttccccaatcacctttcctgttccagaaaaggggctgggatgtctccgtctctgtctcaaatttgtggtgcactgagctataacttacttctgtattaaaattagaatctgagtataaatttagtttttcaaattatttccaagagagattgatgggttaattaaaggagaagattcctgaaatttgagagacaaaataaatggaagacatgagaactttcca

SEQ ID NO: 345590 - DNA, 1134 bp, Artificial Sequence
  derived and/or modified sequence
atggtggtcatggcaccccgaaccctcttcctgctactctcgggggccctgaccctgaccgagacctgggcgggctcccactccatgaggtatttcagcgccgccgtgtcccggcccggccgcggggagccccgcttcatcgccatgggctacgtggacgacacgcagttcgtgcggttcgacagcgactcggcgtgtccgaggatggagccgcgggcgccgtgggtggagcaggaggggccagagtattgggaagaggagacacggaacaccaaggcccacgcacagactgacagaatgaacctgcagaccctgcgcggctactacaaccagagcgaggccaacccccccaagacacacgtgacccaccaccctgtctttgactatgaggccaccctgaggtgctgggccctgggcttctaccctgcggagatcatactgacctggcagcgggatggggaggaccagacccaggacgtggagctcgtggagaccaggcctgcaggggatggaaccttccagaagtgggcagctgtggtggtgccttctggagaggagcagagatacacgtgccatgtgcagcatgaggggctgccggagcccctcatgctgagatggaagcagtcttccctgcccaccatccccatcatgggtatcgttgctggtctggttgtccttgcagctgtagtcactggagctgcggtcgctgctgtgctgtggaggaagaagagctcagattgaaaaggagggagctactctcaggctgcaatgtgaaacagctgccctgtgtgggactgagtggcaagatttgttcatgccttccctttgtgacttcaagaaccctgacttctctttctgcagagaccagcccacccctgtgcccaccatgaccctcttcctcatgctgaactgcattccttccccaatcacctttcctgttccagaaaaggggctgggatgtctccgtctctgtctcaaatttgtggtgcactgagctataacttacttctgtattaaaattagaatctgagtataaatttagtttttcaaattatttccaagagagattgatgggttaattaaaggagaagattcctgaaatttgagagacaaaataaatggaagacatgagaa

SEQ ID NO: 345591 - DNA, 1175 bp, Artificial Sequence
  derived and/or modified sequence
atggtggtcatggcgccccgaaccctcttcctgctgctctcgggggccctgaccctgaccgagacctgggcgggctcccactccatgaggtatttcagcgccgccgtgtcccggcccggccgcggggagccccgcttcatcgccatgggctacgtggacgacacgcagttcgtgcggttcgacagcgactcggcgtgtccgaggatggagccgcgggcgccgtgggtggagcaggaggggccggagtattgggaagaggagacacggaacaccaaggcccacgcacagactgacagaatgaacctgcagaccctgcgcggctactacaaccagagcgaggccaacccccccaagacacacgtgacccaccaccctgtctttgactatgaggccaccctgaggtgctgggccctgggcttctaccctgcggagatcatactgacctggcagcgggatggggaggaccagacccaggacgtggagctcgtggagaccaggcctgcaggggatggaaccttccagaagtgggcagctgtggtggtgccttctggagaggagcagagatacacgtgccatgtgcagcatgaggggctgccggagcccctcatgctgagatggaagcagtcttccctgcccaccatccccatcatgggtatcgttgctggcctggttgtccttgcagctgtagtcactggagctgcggtcgctgctgtgctgtggagaaagaagagctcagattgaaaaggagggagctactctcaggctgcaagcagtgacagtgcccagggctctaatgtgtctctcacggcttgtaaattgtgaaacagctgccctgtgtgggactgagtggcaagtccctttgtgacttcaagaaccctgacttctctttgtgcagagaccagcccacccctgtgcccaccatgaccctcttcctcatgctgaactgcattccttccccaatcacctttcctgttccagaaaaggggctgggatgtctccgtctctgtctcaaatttgtggtccactgagctataacttacttctgtattaaaattagaatctgagtgtaaatttactttttcaaattatttccaagagagattgatgggttaattaaaggagaagattcctgaaatttgagagacaaaataaatggaagacatgagaactttcca

SEQ ID NO: 345592 - DNA, 1175 bp, Artificial Sequence
  derived and/or modified sequence
atggtggtcatggcgccccgaaccctcttcctgctgctctcgggggccctgaccctgaccgagacctgggcgggctcccactccatgaggtatttcagcgccgccgtgtcccggcccggccgcggggagccccgcttcatcgccatgggctacgtggacgacacgcagttcgtgcggttcgacagcgactcggcgtgtccgaggatggagccgcgggcgccgtgggtggagcaggaggggccggagtattgggaagaggagacacggaacaccaaggcccacgcacagactgacagaatgaacctgcagaccctgcgcggctactacaaccagagcgaggccaacccccccaagacacacgtgacccaccaccctgtctttgactatgaggccaccctgaggtgctgggccctgggcttctaccctgcggagatcatactgacctggcagcgggatggggaggaccagacccaggacgtggagctcgtggagaccaggcctgcaggggatggaaccttccagaagtgggcagctgtggtggtgccttctggagaggagcagagatacacgtgccatgtgcagcatgaggggctgccggagcccctcatgctgagatggaagcagtcttccctgcccaccatccccatcatgggtatcgttgctggcctggttgtccttgcagctgtagtcactggagctgcggtcgctgctgtgctgtggagaaagaagagctcagattgaaaaggagggagctactctcaggctgcaagcagtgacagtgcccagggctctaatgtgtctctcacggcttgtaaattgtgaaacagctgccctgtgtgggactgagtggcaagtccctttgtgacttcaagaaccctgacttctctttgtgcagagaccagcccacccctgtgcccaccatgaccctcttcctcatgctgaactgcattccttccccaatcacctttcctgttccagaaaaggggctgggatgtctccgtctctgtctcaaatttgtggtccactgagctataacttacttctgtattaaaattagaatctgagtataaatttactttttcaaattatttccaagagagattgataggttaattaaaggagaagattcctgaaatttgagagacaaaataaatggaagacatgagaactttcca

SEQ ID NO: 345593 - DNA, 1191 bp, Artificial Sequence
  derived and/or modified sequence
atggtggtcatggcaccccgaaccctcttcctgctactctcgggggccctgaccctgaccgagacctgggcgggctcccactccatgaggtatttcagcgccgccgtgtcccggcccggccgcggggagccccgcttcatcgccatgggctacgtggacgacacgcagttcgtgcggttcgacagcgactcggcgtgtccgaggatggagccgcgggcgccgtgggtggagcaggaggggccagagtattgggaagaggagacacggaacaccaaggcccacgcacagactgacagaatgaacctgcagaccctgcgcggctactacaaccagagcgaggccaacccccccaagacacacgtgacccaccaccctgtctttgactatgaggccaccctgaggtgctgggccctgggcttctaccctgcggagatcatactgacctggcagcgggatggggaggaccagacccaggacgtggagctcgtggagaccaggcctgcaggggatggaaccttccagaagtgggcagctgtggtggtgccttctggagaggagcagagatacacgtgccatgtgcagcatgaggggctgccggagcccctcatgctgagatggaagcagtcttccctgcccaccatccccatcatgggtatcgttgctggtctggttgtccttgcagctgtagtcactggagctgcggtcgctgctgtgctgtggaggaagaagagctcagattgaaaaggagggagctactctcaggctgcaagcagtgacagtgcccagggctctaatgtgtctctcacggcttgtaaattgtgaaacagctgccctgtgtgggactgagtggcaagatttgttcatgccttccctttgtgacttcaagaaccctgacttctctttctgcagagaccagcccacccctgtgcccaccatgaccctcttcctcatgctgaactgcattccttccccaatcacctttcctgttccagaaaaggggctgggatgtctccgtctctgtctcaaatttgtggtgcactgagctataacttacttctgtattaaaattagaatctgagtataaatttagtttttcaaattatttccaagagagattgatgggttaattaaaggagaagattcctgaaatttgagagacaaaataaatggaagacatgagaactttccaca

SEQ ID NO: 345594 - DNA, 1175 bp, Artificial Sequence
  derived and/or modified sequence
atggtggtcatggcgccccgaaccctcttcctgctgctctcgggggccctgaccctgaccgagacctgggcgggctcccactccatgaggtatttcagcgccgccgtgtcccggcccggccgcggggagccccgcttcatcgccatgggctacgtggacgacacgcagttcgtgcggttcgacagcgactcggcgtgtccgaggatggagccgcgggcgccgtgggtggagcaggaggggccggagtattgggaagaggagacacggaacaccaaggcccacgcacagactgacagaatgaacctgcagaccctgcgcggctactacaaccagagcgaggccaacccccccaagacacacgtgacccaccaccctgtctttgactatgaggccaccctgaggtgctgggccctgggcttctaccctgcggagatcatactgacctggcagcgggatggggaggaccagacccaggacgtggagctcgtggagaccaggcctgcaggggatggaaccttccagaagtgggcagctgtggtggtgccttctggagaggagcagagatacacgtgccatgtgcagcatgaggggctgccggagcccctcatgctgagatggaagcagtcttccctgcccaccatccccatcatgggtatcgttgctggcctggttgtccttgcagctgtagtcactggagctgcggtcgctgctgtgctgtggagaaagaagagctcagattgaaaaggagggagctactctcaggctgcaagcagtgacagtgcccagggctctaatgtgtctctcacggcttgtaaattgtgaaacagctgccctgtgtgggactgagtggcaagtccctttgtgacttcaagaaccctgactcctctttgtgcagagaccagcccacccctgtgcccaccatgaccctcttcctcatgctgaactgcattccttccccaatcacctttcctgttccagaaaaggggctgggatgtctccgtctctgtctcaaatttgtggtccactgagctataacttacttctgtattaaaattagaatctgagtataaatttactttttcaaattatttccaagagagattgatgggttaattaaaggagaagattcctgaaatttgagagacaaaataaatggaagacatgagaactttcca

SEQ ID NO: 345595 - DNA, 1182 bp, Artificial Sequence
  derived and/or modified sequence
atggtggtcatggcaccccgaaccctcttcctgctactctcgggggccctgaccctgaccgagacctgggcgggctcccactccatgaggtatttcagcgccgccgtgtcccggcccggccgcggggagccccgcttcatcgccatgggctacgtggacgacacgcagttcgtgcggttcgacagcgactcggcgtgtccgaggatggagccgcgggcgccgtgggtggagcaggaggggccagagtattgggaagaggagacacggaacaccaaggcccacgcacagactgacagaatgaacctgcagaccctgcgcggctactacaaccagagcgaggccaacccccccaagacacacgtgacccaccaccctgtctttgactatgaggccaccctgaggtgctgggccctgggcttctaccctgcggagatcatactgacctggcagcgggatggggaggaccagacccaggacgtggagctcgtggagaccaggcctgcaggggatggaaccttccagaagtgggcagctgtggtggtgccttctggagaggagcagagatacacgtgccatgtgcagcatgaggggctgccggagcccctcatgctgagatggaagcagtcttccctgcccaccatccccatcatgggtatcgttgctggtctggttgtccttgcagctgtagtcactggagctgcggtcgctgctgtgctgtggaggaagaagagctcagattgaaaaggagggagctactctcaggctgcaagcagtgacagtgcccagggctctaatgtgtctctcacggcttgtaaattgtgaaacagctgccctgtgtgggactgagtggcaagatttgttcatgccttccctttgtgacttcaagaaccctgacttctctttctgcagagaccagcccacccctgtgcccaccatgaccctcttcctcatgctgaactgcattccttccccaatcacctttcctgttccagaaaaggggctgggatgtctccgtctctgtctcaaatttgtggtgcactgagctataacttacttctgtattaaaattagaatctgagtataaatttagtttttcaaattatttccaagagagattgatgggttaattaaaggagaagattcctgaaatttgagagacaaaataaatggaagacatgagaa

SEQ ID NO: 345596 - DNA, 888 bp, Artificial Sequence
  derived and/or modified sequence
atggctgtgatggcccccaggaccctgctgctgctgctgctgggcgccctggccctgacccagacctgggccggcagccacagcatgagatacttcaccacctctgtgtccaggcctggccgcggggagccccgcttcatcgctgtgggctacgtggatgacacccagtttgtgcgctttgacagtgatgctgccagccagaggatggagccccgggccccctggattgagcaggagggccctgagtactgggacctgcagaccagaaatgtgaaggcccagagccagacagaccgggcctacctggagaatggcaaggagaccctgcagaggacagatgcccccaagacccacatgacccaccacgctgtgtctgaccacgaggccaccctgcgctgctgggccctgtccttctacccagctgagatcaccctgacctggcagagagatggagaggaccagacccaggacacagagctggtggagaccaggcctgctggagatggcaccttccagaagtgggcctctgtggtggtgcccagcggccaggagcagcgctacacctgccacgtgcagcacgagggcctgcccaagcccctgaccctgcgctgggagcccagcagccagcccaccatccccatcgtgggcatcatcgccggcctggtgctgtttggagctgtgtttgctggagctgtggtggccgctgtgcgctggaggaggaagagcagtggaggagagggcatgaagggcggcagcgagatcagctgcctgacagagggcagcaagacccaggtggaggtgtgcccagccagcctgctgggcagcaccatccacaactacggccccacccagcccggcccctgtgtgcctgccctgaccctgctgtag

SEQ ID NO: 345597 - DNA, 888 bp, Artificial Sequence
  derived and/or modified sequence
atggctgtgatggcccccaggaccctgctgctgctgctgctgggcgccctggccctgacccagacctgggccggcagccacagcatgagatacttcttcacctctgtgtccaggcctggccgcggggagccccgcttcatcgctgtgggctacgtggatgacacccagtttgtgcgctttgacagtgatgctgccagccagaggatggagccccgggccccctggattgagcaggagggccctgagtactgggaccaggagaccagaaatgtgaaggcccacagccagacagaccggcgctacctggagaatggcaaggagaccctgcagaggacagatgcccccaagacccacatgacccaccacgctgtgtctgaccacgaggccaccctgcgctgctgggccctgtccttctacccagctgagatcaccctgacctggcagagagatggagaggaccagacccaggacacagagctggtggagaccaggcctgctggagatggcaccttccagaagtgggcctctgtggtggtgcccagcggccaggagcagcgctacacctgccacgtgcagcacgagggcctgcccaagcccctgaccctgcgctgggagcccagcagccagcccaccatccccatcgtgggcatcatcgccggcctggtgctgtttggagccatgtttgctggagctgtggtggccgctgtgcgctggaggaggaagagcagtggaggagagggcatgaagggcggcagcgagatcagctgcctgacagagggcagcaagacccaggtggaggtgtgcccagccagcctgctgggcagcaccatccacaactacggccccacccagcccggcccctgtgtgcctgccctgaccctgctgtag

SEQ ID NO: 345598 - DNA, 888 bp, Artificial Sequence
  derived and/or modified sequence
atggctgtgatggcccccaggaccctggtgctgctgctgagcggggccctggccctgacccagacctgggccggcagccacagcatgagatacttctacacctctgtgtccaggcctggccgcggggagccccgcttcatcgctgtgggctacgtggatgacacccagtttgtgcgctttgacagtgatgctgccagccagaggatggagccccgggccccctggattgagcaggagggccctgagtactgggacaggaacaccagaaatgtgaaggcccacagccagacagaccgggcctacctggagaatggcaaggagaccctgcagaggacagatgcccccaagacccacatgacccaccacgctgtgtctgaccacgaggccaccctgcgctgctgggccctgtccttctacccagctgagatcaccctgacctggcagagagatggagaggaccagacccaggacacagagctggtggagaccaggcctgctggagatggcaccttccagaagtgggcctctgtggtggtgcccagcggccaggagcagcgctacacctgccacgtgcagcacgagggcctgcccaagcccctgaccctgcgctgggagcccagcagccagcccaccatccccatcgtgggcatcatcgccggcctggtgctgtttggagctgtgattgctggagctgtggtggccgctgtgatgtggaggaggaagagcagtggaggagagggcatgaagggcggcagcgagatcagctgcctgacagagggcagcaagacccaggtggaggtgtgcccagccagcctgctgggcagcaccatccacaactatgagcccacccagcccggcccctgtgtgcctgccctgaccctgctgtag

SEQ ID NO: 345599 - DNA, 1050 bp, Artificial Sequence
  derived and/or modified sequence
atggcccccaggagcctgctgctgctgctgagcggggccctggccctgacagacacctgggccggcagccacagcctgcgctacttcagcacagctgtgtcccggcccggccgcggggagccccgctacatcgctgtggagtatgtggatgacacccagttcctgcgctttgacagtgatgctgccatccccaggatggagccccgggagccctgggtggagcaggagggcccccagtactgggagtggaccaccggctacgccaaggccaatgcccagacagacagagtggccctgaggaacctgctgcggcgctacctggagaatggcaaggagaccctgcagagagctgacccccccaaggcccacgtggcccaccaccccatcagtgaccacgaggccaccctgcgctgctgggccctgggcttctacccagctgagatcaccctgacctggcagagagatggagaggagcagacccaggacacagagctggtggagaccaggcctgctggagatggcaccttccagaagtgggccgctgtggtggtgcccccaggagaggagcagcgctacacctgccacgtgcagcacgagggcctgccccagcccctcatcctgcgctgggagcagagcccccagcccaccatccccatcgtgggcatcgtggccggcctggtggtgctgggcgctgtggtgactggagctgtggtggccgctgtgatgtggaggaagaagagcagtgacaggaacagaggcagctacagccaggccgccgcctacagcgtggtgtctggcaacctgatgatcacctggtggagcagcctcttcctgctgggcgtgctcttccagggctacctgggctgcctgcggagccacagcgtgctgggccgcaggaaggcccagctgctgtctgtgtccaccagccagaccagcatcctgatccaggagcagttcagccaccagaggaccctggccatgtctgggaagatgttctgctgccacgactggagcgaggaggaggtgctgcctgccagctgtggggagtag

SEQ ID NO: 345600 - DNA, 1050 bp, Artificial Sequence
  derived and/or modified sequence
atggcccccaggagcctgctgctgctgctgagcggggccctggccctgacagacacctgggccggcagccacagcctgcgctacttcagcacagctgtgtcccggcccggccgcggggagccccgctacatcgctgtggagtatgtggatgacacccagttcctgcgctttgacagtgatgctgccatccccaggatggagccccgggagccctgggtggagcaggagggcccccagtactgggagtggaccaccggctacgccaaggccaatgcccagacagacagagtggccctgaggaacctgctgcggcgctacctggagaatggcaaggagaccctgcagagagctgacccccccaaggcccacgtggcccaccaccccatcagtgaccacgaggccaccctgcgctgctgggccctgggcttctacccagctgagatcaccctgacctggcagagagatggagaggagcagacccaggacacagagctggtggagaccaggcctgctggagatggcaccttccagaagtgggccgctgtggtggtgcccagcggggaggagcagcgctacacctgccacgtgcagcacgagggcctgccccagcccctcatcctgcgctgggagcagagcccccagcccaccatccccatcgtgggcatcgtggccggcctggtggtgctgggcgctgtggtgactggagctgtggtggccgctgtgatgtggaggaagaagagcagtgacaggaacagaggcagctacagccaggccgccgcctacagcgtggtgtctggcaacctgatgatcacctggtggagcagcctcttcctgctgggcgtgctcttccagggctacctgggctgcctgcggagccacagcgtgctgggccgcaggaaggcccagctgctgtctgtgtccaccagccagaccagcatcctgatccaggagcagttcagccaccagaggaccctggccatgtctgggaagatgttctgctgccacgactggagcgaggagaaggtgctgcctgccagctgtggggagtag

SEQ ID NO: 345601 - DNA, 1050 bp, Artificial Sequence
  derived and/or modified sequence
atggcccccaggagcctgctgctgctgctgagcggggccctggccctgacagacacctgggccggcagccacagcctgcgctacttcagcacagctgtgtcccggcccggccgcggggagccccgctacatcgctgtggagtatgtggatgacacccagttcctgcgctttgacagtgatgctgccatccccaggatggagccccgggagccctgggtggagcaggagggcccccagtactgggagtggaccaccggctacgccaaggccaatgcccagacagacagagtggccctgaggaacctgctgcggcgctacctggagaatggcaaggagaccctgcagagagctgacccccccaaggcccacgtggcccaccaccccatcagtgaccacgaggccaccctgcgctgctgggccctgggcttctacccagctgagatcaccctgacctggcagagagatggagaggagcagacccaggacacagagctggtggagaccaggcctgctggagatggcaccttccagaagtgggccgctgtggtggtgcccagcggggaggagcagcgctacacctgccacgtgcagcacgagggcctgccccagcccctcatcctgcgctgggagcagagcccccagcccaccatccccatcgtgggcatcgtggccggcctggtggtgctgggcgctgtggtgactggagctgtggtggccgctgtgatgtggaggaagaagagcagtgacaggaacagaggcagctacagccaggccgccgcctacagcgtggtgtctggcaacctgatgatcacctggtggagcagcctcttcctgctgggcgtgctcttccagggctacctgggctgcctgcggagccacagcgtgctgggccgcaggaaggcccagctgctgtctgtgtccaccagccagaccagcatcctgatccaggagcagttcagccaccagaggaccctggccatgtctgggaagatgttctgctgccacgactggagcgaggaggaggtgctgcctgccagctgtggggagtag

SEQ ID NO: 345602 - DNA, 465 bp, Artificial Sequence
  derived and/or modified sequence
atggtggtgatggcccccaggaccctcttcctgctgctgagcggggccctgaccctgacagagacctgggccggcagccacagcatgagatacttctctgctgctgtgtccaggcctggccgcggggagccccgcttcatcgccatgggctacgtggatgacacccagtttgtgcgctttgacagcgacagcgcctgccccaggatggagccccgggccccctgggtggagcaggagggccctgagtactgggaggaggagaccaggaacaccaaggcccacgcccagacagacaggatgaacctgcagaccctgcggggctactacaaccagagcgaggccaagcagagcagcctgcccaccatccccatcatgggcatcgtggccggcctggtggtgctggccgctgtggtgactggagctgctgtggccgctgtgctgtggaggaagaagagcagtgactag

SEQ ID NO: 345603 - DNA, 741 bp, Artificial Sequence
  derived and/or modified sequence
atggtggtgatggcccccaggaccctcttcctgctgctgagcggggccctgaccctgacagagacctgggccggcagccacagcatgagatacttctctgctgctgtgtccaggcctggccgcggggagccccgcttcatcgccatgggctacgtggatgacacccagtttgtgcgctttgacagcgacagcgcctgccccaggatggagccccgggccccctgggtggagcaggagggccctgagtactgggaggaggagaccaggaacaccaaggcccacgcccagacagacaggatgaacctgcagaccctgcggggctactacaaccagagcgaggccaacccccccaagacccacgtgacccaccaccctgtgtttgattatgaggccaccctgcgctgctgggccctgggcttctacccagctgagatcatcctgacctggcagagagatggagaggaccagacccaggatgtggagctggtggagaccaggcctgctggagatggcaccttccagaagtgggccgctgtggtggtgcccagcggggaggagcagcgctacacctgccacgtgcagcacgagggcctgcctgagcccctgatgctgcgctggaagcagagcagcctgcccaccatccccatcatgggcatcgtggccggcctggtggtgctggccgctgtggtgactggagctgctgtggccgctgtgctgtggaggaagaagagcagtgactag

SEQ ID NO: 345604 - DNA, 888 bp, Artificial Sequence
  derived and/or modified sequence
atggccgtgatggccccccggaccctgctgctgctgctgctgggcgctctggcgttgacccaaacttgggcaggcagccacagtatgcggtactttacgacatcagtgagtaggcctgggcggggcgaaccgcgatttatcgcagttggctatgtggacgacactcagtttgttcggttcgactccgatgctgcatctcaaagaatggaacctcgggcgccctggattgagcaggaaggccccgagtactgggacctccagacccgcaacgtgaaagcccagtctcagactgaccgtgcataccttgaaaatggaaaggagaccctgcaaaggactgacgcccctaagactcacatgacgcaccacgcggtgtcagatcatgaagccactctgaggtgttgggctctgagcttctacccagcggaaatcaccctcacttggcagagggatggagaagaccaaacccaagatacagagctggtcgagacccgtcctgccggtgacggaaccttccagaagtgggcctcggtggtggtaccttcaggccaggaacagaggtacacttgccatgttcaacacgagggactgccgaaacccttgacgctgcgatgggaaccatctagccagccaacgattcctattgtggggataatcgccgggctcgtgctcttcggtgcagtgtttgccggggcagtagtcgccgctgtacggtggaggcgcaagtccagtggaggggagggcatgaagggaggctctgaaatttcttgcctaaccgagggatcgaagactcaggtggaagtctgcccagcgtcgttactgggaagcaccatccacaactacggacctactcaaccaggaccctgtgtgcccgcattgactttgttgtag

SEQ ID NO: 345605 - DNA, 888 bp, Artificial Sequence
  derived and/or modified sequence
atggccgtgatggccccccggaccctgctgctgctgctgctgggcgctctggccctgacacagacatgggccggtagccactcgatgaggtacttctttacaagtgtcagtaggccaggacgtggagagccgagattcatcgcggtcggatatgtggacgatacccaattcgtcagattcgactcagatgctgcgagccaacgcatggagcccagggcgccttggattgagcaggaggggccagagtattgggatcaggagactcgaaacgtgaaagcgcactctcagacagataggcgataccttgaaaatggcaaggagacactccagaggactgacgcccccaaaacccatatgactcaccatgctgtctccgatcacgaggccacccttagatgctgggctctgtccttttaccctgcggagattaccttaacttggcagagagatggagaggaccagacccaggataccgagctggtagaaactcgccccgcaggcgatgggacttttcaaaagtgggctagcgtcgtcgtaccatccgggcaggaacagcgttacacctgtcacgtacagcatgagggtctccctaagcccctgacgctgcgttgggaaccctcaagccaaccaaccattccgatcgttggcatcattgcgggcctggtgctattcggcgccatgttcgctggagctgtagtggccgccgtcaggtggaggcgcaagagcagcggtggcgaggggatgaagggaggttccgagatatcttgccttactgaagggagtaaaacgcaggtggaggtttgccctgcatccttactgggctccacgatccacaactacggcccgacacagcctggtccgtgcgtgccagctttaacactactgtag

SEQ ID NO: 345606 - DNA, 888 bp, Artificial Sequence
  derived and/or modified sequence
atggccgtgatggccccccggaccctggtgctgctgctgagcggcgcactagccttgactcagacctgggccggatctcactcgatgaggtacttctacacctccgttagccggccaggccgaggagaacctcgcttcatcgccgtggggtacgtcgacgacacccaatttgtgagattcgattcggacgccgcaagccaacggatggaacctagggctccttggattgagcaagaaggccccgagtattgggatagaaatacaaggaatgtaaaggcccattcccagacggatcgggcttacctcgagaacggaaaggaaacacttcagcgcacagacgccccaaagacccatatgacccatcacgccgtgagcgaccacgaggctacgctccgatgttgggctctgtcattttatccagctgagatcactcttacatggcagcgggacggggaagaccagactcaggacactgaactggtagagactcgtccagctggggatgggacatttcagaagtgggcttctgtggtcgtgccatccgggcaggagcagcgctacacttgccacgtgcagcacgagggtctgcccaaacctttgaccctccgttgggagccctcctcccagcctaccatacccatcgtggggataatcgccggactcgttcttttcggcgccgtcatagccggcgccgtggtcgccgcagtgatgtggcgtcgtaagagttccggtggagaaggaatgaagggcgggtccgagataagctgtctgacagagggaagcaaaactcaagtcgaggtctgtcctgcatcccttctgggcagcacaattcacaactacgagcctactcaaccaggcccctgcgtgcccgctctgactctactgtag

SEQ ID NO: 345607 - DNA, 1050 bp, Artificial Sequence
  derived and/or modified sequence
atggccccccggagcctgctgctgctgctgagcggcgccctggccttaaccgatacatgggccggctcacactccctccgatacttttctacggccgtgtctagaccagggaggggagaaccacggtacatcgccgtcgaatacgtcgatgacacacaattcttgagatttgactctgacgctgccataccaagaatggagccacgtgagccttgggtagagcaagaagggccccaatattgggagtggactacagggtacgccaaggcaaatgcccagaccgaccgcgttgccctgcgaaacttgcttaggcgatacctggaaaatggaaaagagacattacagagagctgacccccctaaagcccatgtagctcatcaccctatttcagatcacgaggctactctgcggtgctgggcacttggattttaccccgccgaaatcactctaacatggcaaagggatggcgaagagcagactcaggacaccgagctggtggagactcggcctgccggggacggaaccttccagaagtgggctgctgttgttgtcccgcccggggaagaacagagatatacatgtcacgtccaacacgaaggcctccctcagcccctgatactgcgctgggagcagtcaccacagcctactatccccattgttgggattgtggccggactcgttgtcctgggcgctgtggttaccggggcagtcgtcgccgccgtgatgtggagaaaaaaatcatccgatcgaaatagaggtagttacagccaagctgccgcctattccgtcgttagtggcaatttaatgatcacttggtggtcttcattgtttctgctgggtgttctgttccaaggatatctcggctgccttcgatcccattcagtactgggccgacggaaggcacagttgctgagcgtatccacatcccagacttctatcctcatccaggaacaattttcacatcagcggaccctggcgatgagtggaaagatgttttgctgccatgattggagcgaagaggaagtgcttcctgctagctgtggagagtag

SEQ ID NO: 345608 - DNA, 1050 bp, Artificial Sequence
  derived and/or modified sequence
atggccccccggagcctgctgctgctgctgagcggcgccctggccctgaccgatacgtgggctgggagccatagtctgcgctacttctctaccgctgtcagtcggccgggtaggggagaacctaggtatatcgcagtcgaatacgtggatgatacacaattcctgcggttcgacagcgacgctgctattccacgaatggagccccgggagccttgggttgagcaggaggggccccagtactgggagtggacaactggctacgcaaaggccaacgcgcagacggatcgagtagctttgagaaacctgctgcgcaggtacctggaaaacggcaaagagactctgcagcgggctgatccaccgaaggcccatgtagcccaccatcccataagtgatcatgaagccacattaaggtgttgggccctggggttctatccagccgaaatcacactgacatggcagcgagacggcgaggaacagacgcaagatactgaattggtggagactcggccagcaggggatggtactttccagaaatgggcagctgtggttgttccttctggggaagaacagaggtatacctgccatgttcagcatgagggtttgccacagcccttgatcttgagatgggagcagtcacctcagcctacaatccctatagttggtattgtcgctggcttggtggtgcttggtgcagtggtgactggcgccgtcgtggctgcggtcatgtggcggaagaagagcagcgatcgaaaccgaggttcttacagtcaggccgccgcctattccgtggtgtccggaaatctgatgattacatggtggagcagcctctttctgttgggggtgttgtttcaggggtatcttggttgtctgagaagtcactctgtgctcgggcgccgaaaggctcagttgttatccgtctctactagccagactagtatcttaattcaggaacagttttcccatcaacggacacttgccatgtctggtaagatgttctgttgtcatgactggagtgaagaaaaggttctgccagccagctgtggggagtag

SEQ ID NO: 345609 - DNA, 1050 bp, Artificial Sequence
  derived and/or modified sequence
atggccccccggagcctgctgctgctgctgagcggcgccctggccctcaccgacacttgggccgggtctcatagtcttcggtatttcagtacagccgttagccgacctggacgcggggaaccacgctacattgcagtggagtacgtcgatgatacacaatttctcaggtttgatagtgacgcagcaattcctaggatggagccccgcgaaccttgggttgagcaagagggtcctcagtactgggaatggaccacaggctacgcaaaggccaacgctcagacagatcgggttgctctccgaaatttactgcgaaggtacctggagaacgggaaggaaacccttcagcgggccgacccccctaaagcccatgtggctcatcaccctatttccgaccatgaagcgacactacgatgttgggccctcggattttatcctgccgagattaccctgacatggcagcgcgatggcgaggaacagacccaggacacggagctcgttgaaacgcggcccgctggagacggcaccttccagaagtgggccgccgtggtggttccgtccggcgaggagcagcgctacacctgccacgtgcaacatgagggacttccccagccgctgattttaaggtgggagcagagccctcagcccacaattccgattgttggcatagtggctggactagtggtgcttggcgctgtggttacgggggctgttgtcgccgcagtgatgtggcggaagaagtcaagcgacagaaatcgcggatcgtacagccaggcagctgcctacagtgtggtttcaggcaacctcatgataacatggtggtcatcattgtttctcctcggagtgctcttccaggggtatctcggatgtctgaggtcccatagtgttctaggccgcaggaaagctcaacttttgtccgttagtacaagccaaacttctattctcatccaggaacaatttagccatcagagaaccctggctatgtcgggaaagatgttctgttgccatgattggtccgaggagaaggtgctccccgccagctgtggagagtag

SEQ ID NO: 345610 - DNA, 1050 bp, Artificial Sequence
  derived and/or modified sequence
atggccccccggagcctgctgctgctgctgagcggcgccctggccctgaccgatacctgggcaggatctcattctttgcgttattttagcacagcagtctcacgaccagggcggggagagccccgttatatcgccgtcgagtacgtggacgatactcagtttctgaggttcgactcggatgccgcaatccccaggatggaacccagagagccctgggtcgaacaggagggtccccaatattgggagtggactaccggctacgctaaggccaatgcccaaaccgaccgtgtggcacttagaaatctgctgcgtcgctatttggaaaatggcaaagaaaccctgcagcgtgccgatcccccgaaggcccatgtggcacatcacccaatttccgaccacgaggcaacattaaggtgctgggccctgggcttctaccccgccgagataaccttaacatggcagcgagatggcgaggaacagacgcaggatacggagttggtggagacacgaccagccggggacggcactttccaaaaatgggccgccgtggtcgtgccaagtggcgaggagcagcgctacacctgccatgtccagcacgaggggttgccacagcctctcatcctccgctgggagcagtctccacaacccaccataccgattgtggggatcgttgcaggactggtggtgctcggcgcagtggttactggtgccgtggtggcggcggtgatgtggagaaagaaatcctctgatagaaatcggggatcttatagccaggccgccgcctacagcgttgtgtctggcaacctgatgatcacatggtggagctcactgttcttgctgggcgtcctgttccaaggatatttgggctgtctgcgcagtcatagcgtcctgggccgaaggaaggcccaactgctcagtgtgtccacaagccaaacaagcatattaatacaggaacagttttcacaccagagaaccctggctatgtcaggcaaaatgttttgttgtcatgactggtctgaggagaaagtgctgcctgcttcttgcggcgaatag

SEQ ID NO: 345611 - DNA, 1050 bp, Artificial Sequence
  derived and/or modified sequence
atggccccccggagcctgctgctgctgctgagcggcgccctggccctgacagatacatgggctggttcacactccctgaggtattttagcaccgctgtatctcgccccggcaggggcgaacctagatatatcgctgtcgagtacgtggacgatactcaattcctgaggttcgacagcgacgccgctatcccaagaatggaacctagagaaccatgggtggaacaagaaggcccccagtattgggagtggaccaccggttatgctaaggctaacgctcaaaccgatagagtagccctgcgcaacctccttaggagatatctggagaatggcaaagagactctgcagagggcagaccctcccaaagctcatgtcgcacaccacccaatcagcgaccacgaagccactctgcggtgttgggcactcggcttctaccctgccgagatcacactcacttggcagcgagatggcgaggaacagacccaggataccgagctcgtcgaaacaagaccggccggcgatgggacctttcagaaatgggccgcagtggtcgtcccttccggcgaggagcaacgatatacctgtcacgtccaacacgaaggtctgccacagccccttatcctgaggtgggagcaatccccacagcccaccattcccattgtgggaattgtggccggtctagtggtgctgggtgcagtggttacgggggccgtggtcgcggccgtgatgtggagaaaaaagagctccgatcgaaatcgtgggtcgtatagccaggccgccgcctattctgtagtgagcggaaatttgatgatcacctggtggtcttccctttttctgctgggcgtgctctttcaaggttacctagggtgcctcaggagtcacagtgtcctgggacggcggaaggctcaattgctttctgtaagcaccagccagactagcattctcattcaggaacagttctcgcatcagagaaccctggctatgagcgggaaaatgttttgctgccacgattggagcgaggaagaagtgctcccagcctcttgcggcgaatag

SEQ ID NO: 345612 - DNA, 465 bp, Artificial Sequence
  derived and/or modified sequence
atggtggtgatggccccccggaccctgttcctgctgctgagcggcgcactgactctgaccgaaacctgggccggtagtcacagtatgcgttatttctccgctgctgtatcccggccaggccgcggggaaccccggtttatcgctatggggtacgtcgacgacacacagtttgtgagattcgactcagattcagcttgccctcgtatggagcctcgtgcgccctgggtcgagcaggaaggacccgaatactgggaggaggagacaagaaatactaaagctcatgcacagaccgaccgcatgaacctgcaaacactgagaggatactataatcaaagcgaggctaaacaatccagcctgcctacaattcccattatggggattgtggcggggctggtagtgttggccgctgtggttacaggcgccgccgttgctgcggtgctgtggcggaaaaaaagcagcgattag

SEQ ID NO: 345613 - DNA, 741 bp, Artificial Sequence
  derived and/or modified sequence
atggtggtgatggccccccggaccctgttcctgctgctgagcggcgctcttacactgaccgaaacatgggcaggatcacattccatgaggtatttctcagcagctgtctctaggcctggacggggagaaccacgcttcatcgctatgggttacgtggatgacactcagttcgtgcgtttcgacagcgactccgcctgccccaggatggaacctcgggccccatgggtggagcaagaagggcctgaatattgggaggaggagacccggaacacaaaagcccacgcccagacggacaggatgaacttacagacccttcgagggtattataaccagtcagaggccaatcccccaaagacccacgttacccaccatcccgtctttgactacgaagccactctccgctgttgggccctcggattttacccagcagaaattattctgacctggcagcgcgacggcgaagatcagacccaggatgtggaactcgtagaaacacgccccgcaggcgatggtactttccaaaagtgggctgctgtggtcgttccctccggtgaggaacagcggtatacctgtcatgtgcagcacgaaggcctgcctgaacccctgatgctgcgatggaagcagtcttcattgccaaccatcccaatcatgggcatagtcgcggggttagtcgtcctggcagcagtggttacgggggcagcagtcgccgctgtgctgtggcgtaagaagtcttcagactag

SEQ ID NO: 345614 - DNA, 465 bp, Artificial Sequence
  derived and/or modified sequence
atggtggtgatggccccccggaccctgttcctgctgctgagcggcgccctgacccttaccgagacttgggcaggcagtcacagcatgagatacttttctgctgctgtgtcaagaccagggcgaggagagccccggtttatagcgatgggatacgtcgatgacacccagttcgtaagattcgactctgactccgcttgccctcgcatggagcctagagctccctgggtggagcaggaggggcccgaatattgggaagaggaaaccaggaatacaaaagcccatgcccaaactgacaggatgaacctccaaaccctgcgggggtactacaaccaaagcgaagcaaaacagtctagcctgcctacgattcctataatgggcatcgtggcgggcctcgttgttcttgcagccgtcgtaacaggggccgccgtcgctgccgtgctgtggaggaagaaatcctccgactag

SEQ ID NO: 345615 - DNA, 741 bp, Artificial Sequence
  derived and/or modified sequence
atggtggtgatggccccccggaccctgttcctgctgctgagcggcgccttgaccctaactgaaacatgggccggttctcactcaatgagatacttttccgccgccgtttctaggcctgggcgcggcgagccccgatttattgcaatggggtatgtggacgatactcagtttgtccgattcgacagcgactccgcctgtccaagaatggagccacgcgccccttgggtggaacaggaaggaccggagtactgggaggaggagacccgaaatacaaaagcccatgcacagaccgatcgcatgaatctccagacactgagaggctactacaatcagagcgaagccaacccccccaaaacccacgtgacacaccaccctgttttcgactatgaagcaacgctgcgctgctgggccttggggttttatcccgcggagatcattttaacttggcagcgcgacggagaggatcaaacacaggacgtagagctggttgagacccggcccgcaggagacggtactttccagaagtgggctgctgtcgtagttcccagcggtgaagagcagagatatacctgtcatgtgcagcacgagggtttacccgagcccctcatgctccgatggaagcagagttccctgcccaccatacctatcatgggtatcgtggctggccttgtggtgctcgctgccgtggtgaccggcgccgctgtggctgccgtgctctggcgcaagaaatctagcgattag

SEQ ID NO: 345616 - DNA, 741 bp, Artificial Sequence
  derived and/or modified sequence
atggtggtgatggccccccggaccctgttcctgctgctgagcggcgccctaacgttaactgaaacatgggcaggctctcattctatgcgttacttcagcgcagccgtctccagacctggccgaggtgaacctcgttttattgccatgggctatgtagacgatacccagtttgtgaggttcgactccgacagtgcctgtcccaggatggaaccacgggcaccctgggttgagcaagagggtccggaatactgggaagaggagaccaggaataccaaagcccatgcgcagactgaccgtatgaacctgcagactttgcgcgggtattataatcagagcgaagccaaccccccaaagacacacgtcacgcaccaccccgtgtttgattatgaggctactctaaggtgctgggcactgggcttttatcctgcagagatcatcctgacatggcagcgggacggcgaagaccagacccaagacgtcgaactggtggaaacaaggcccgccggggacgggaccttccagaagtgggcagccgtggtggttccgtcgggggaagagcagaggtacacctgtcacgttcaacacgagggattgcccgaacctctaatgctgcgctggaaacagagtagtctgcccaccatccccataatgggcatcgtagctggactcgtggttcttgctgctgtggtcaccggagcagctgttgctgcggtactgtggcggaagaagagcagcgactag

SEQ ID NO: 345617 - DNA, 465 bp, Artificial Sequence
  derived and/or modified sequence
atggtggtgatggccccccggaccctgttcctgctgctgagcggcgcactcacactaacagagacctgggctggttcccattctatgagatacttttcagcagcggtatctcggccaggcaggggcgaaccaagattcatagccatggggtatgtcgatgacactcagtttgtgcgcttcgactccgacagcgcctgcccccgaatggagccccgagcaccgtgggtcgagcaggagggacccgagtactgggaggaggagacgcgcaacactaaggcacatgctcagacggacagaatgaatcttcagactctgagaggctactataaccaaagcgaggctaagcagtccagcctgccaaccatccctataatggggattgtggccggcctggtcgtcctggcagcagttgtcactggcgcagccgttgctgctgtgctgtggcggaaaaagagttctgattag

SEQ ID NO: 345618 - DNA, 741 bp, Artificial Sequence
  derived and/or modified sequence
atggtggtgatggccccccggaccctgttcctgctgctgagcggcgcacttacactgactgagacatgggcaggttcacacagcatgaggtacttttccgccgcagtctcccggcccgggaggggagaaccaaggttcattgctatggggtacgtggatgacacgcagttcgttagatttgactccgattcagcatgcccacgcatggagccgagagccccttgggtggagcaggaagggcccgagtactgggaggaagagacaagaaatacaaaagcgcatgcacagaccgaccgcatgaacctgcaaactttacgcggttattataatcagagcgaagccaatccaccgaagacccatgtgacacatcacccggtttttgattacgaagcaacgctgagatgttgggctctgggcttctaccctgctgagattatcttgacatggcaacgcgatggtgaagaccagacccaagatgtagaactggtggaaacgaggcccgcaggtgacgggacctttcaaaagtgggccgcggtggttgtaccatcaggagaggagcagagatatacatgtcatgtccagcacgagggccttccggaacccctgatgctcagatggaagcagagctcacttcccacgatacccattatggggatcgttgccggcctcgttgtcctggccgccgtagtaaccggagcggcagtggcagctgtgctctggagaaagaaatcatctgactag

SEQ ID NO: 345619 - DNA, 465 bp, Artificial Sequence
  derived and/or modified sequence
atggtggtgatggccccccggaccctgttcctgctgctgagcggcgctctgaccctgaccgaaacctgggcagggagccacagtatgagatacttctccgcagctgtgtcgaggcctggcagaggggaacctcggttcatcgcgatgggatacgtcgatgatacacaatttgtgagatttgactctgattctgcctgccccagaatggagcccagagcaccatgggttgaacaggagggaccagagtactgggaagaagagactcgcaacaccaaagcccatgcgcagacggaccgtatgaatctgcagaccttacgcggttactacaaccagtccgaagccaagcagtccagcctacctacaatcccaatcatgggcatcgtggcaggactcgtggtgctggccgcggtcgttactggcgcagctgtcgccgccgtgctttggaggaaaaaatcctccgattag

SEQ ID NO: 345620 - DNA, 741 bp, Artificial Sequence
  derived and/or modified sequence
atggtggtgatggccccccggaccctgttcctgctgctgagcggcgctctcacattgacagaaacatgggccggttcacacagcatgaggtactttagcgctgcagtgtcaaggcccggcagaggcgagcctaggttcattgctatggggtatgtcgacgacacccagtttgttagattcgacagcgatagtgcgtgcccacgcatggagcctcgggccccatgggtggagcaggaagggcctgaatactgggaggaagaaacaagaaacaccaaggcacatgctcagacggatcgtatgaatctgcaaaccctcaggggatactacaaccagtcagaggccaacccccccaagacacacgtgactcaccaccccgtttttgactatgaggctacgttacgatgttgggctctgggcttctatcccgctgagataattctgacctggcagagggatggcgaagatcagacacaagacgtggaactcgtggagacacggcctgctggcgacggcacatttcagaaatgggccgccgttgtggtacccagcggcgaggaacagcgatatacgtgccatgtccagcacgaaggactgcccgagcccttaatgctgaggtggaagcagagttctctgcccaccatacccataatgggaatagtggccggtcttgtcgttctggcggccgtggtgaccggcgccgcagtagcggcagtgctgtggagaaagaagtcgtcagactag

SEQ ID NO: 345621 - DNA, 741 bp, Artificial Sequence
  derived and/or modified sequence
atggtggtgatggccccccggaccctgttcctgctgctgagcggcgctctgactctaactgaaacgtgggccgggtctcactcaatgaggtacttcagtgcggctgtatctcgaccgggtcgaggcgagcctagatttatcgcaatgggatacgtggatgacacccaattcgtgcggtttgattcggactctgcatgcccaagaatggagccacgagctccatgggtcgagcaggaagggccggaatactgggaggaggaaacaaggaacaccaaggctcatgctcagacggatagaatgaacctgcagaccctgcgagggtactacaaccagtccgaagctaatcccccgaagacccacgtgacacaccaccctgtgtttgattatgaggctaccttacgctgttgggccctcggcttttaccctgccgaaatcatcctgacatggcagcgggacggcgaggatcagacccaggacgtggagctcgtggagaccagacctgctggagatgggacctttcagaagtgggcagccgtggttgtgccttccggcgaggaacaacgctacacctgtcacgtccaacacgagggcctccccgagcctctaatgctgaggtggaagcagagttccctgccaactattcccataatgggaattgtggccgggttagtggtgcttgcagctgtggtaacaggggccgccgtagccgccgtgttatggaggaaaaagagttctgattag

SEQ ID NO: 345622 - DNA, 465 bp, Artificial Sequence
  derived and/or modified sequence
atggtggtgatggccccccggaccctgttcctgctgctgagcggcgctctaacacttactgagacatgggcaggcagtcattccatgcgatacttcagtgcagccgtcagccgtcctgggcggggcgagcccagattcatcgctatgggctatgtggatgacacccagttcgtgcgctttgactcagattccgcatgtcctcgaatggagcctcgggcaccatgggtggagcaggaaggcccagaatattgggaagaggaaacacgaaacactaaagcacatgcccagaccgaccgcatgaatttgcaaactctcaggggatattataatcaaagcgaggcgaagcagtcctccctgcccacaattcctattatgggtatcgtagccggacttgtagtcttggcagcggtggtgaccggagccgctgtggccgccgtgctctggcgaaaaaaatcctctgactag

SEQ ID NO: 345623 - DNA, 465 bp, Artificial Sequence
  derived and/or modified sequence
atggtggtgatggccccccggaccctgttcctgctgctgagcggcgcactgacgctgactgaaacgtgggcaggaagccatagcatgcgttacttcagcgctgcagttagccgcccaggacggggcgagcccaggttcatcgcaatggggtatgtggatgatactcaattcgtcagattcgactccgattctgcctgtccacggatggagccacgggctccttgggtagaacaggaaggaccagagtattgggaggaagaaactagaaataccaaagcgcacgcccagaccgaccggatgaacttgcagacgttgcgagggtattataaccagtcagaggccaaacaatcgtcactgcctactatcccgataatgggcatcgttgcaggactcgtggtgctcgcagctgtcgttacaggcgccgctgttgccgcagtgctctggcggaaaaagtcttcggattag

SEQ ID NO: 345624 - DNA, 741 bp, Artificial Sequence
  derived and/or modified sequence
atggtggtgatggccccccggaccctgttcctgctgctgagcggcgccttgacccttaccgagacctgggccggttcgcactctatgcgttatttctccgcagccgtctctcgccccgggagaggcgagccaagattcatagcaatgggatatgttgacgacacccaatttgtgcggtttgactccgacagcgcatgcccaaggatggaaccccgcgctccctgggtggagcaggaagggccagaatattgggaggaagaaacacgaaacacaaaggcacacgcccaaaccgatcgcatgaacctccagactctgcgcggatattataatcagagcgaagccaacccccccaaaactcacgtgacgcatcaccccgtgtttgactatgaggccacccttcggtgttgggccttaggattctaccctgcagagattatactgacttggcaacgcgacggggaagatcagacacaggacgtagagctggtggaaacacgccccgctggcgatggcacttttcagaaatgggcggcggtcgtggtaccctcgggagaggaacagaggtacacttgtcatgtgcagcacgagggtttgcccgaacctcttatgctgcggtggaagcagagcagccttccgacaattcccataatggggatcgtggccggtttagtcgttctggctgccgtggttaccggtgccgctgtagcagcagttctctggcgcaagaaatcgtccgattag

SEQ ID NO: 345625 - DNA, 741 bp, Artificial Sequence
  derived and/or modified sequence
atggtggtgatggccccccggaccctgttcctgctgctgagcggcgctctgacactgaccgagacatgggcgggcagccatagcatgcgatacttcagcgcggctgtgagtaggcctggcaggggggagcccagattcatcgccatgggttatgttgacgatactcagtttgtacgttttgactccgacagcgcgtgcccgagaatggaacctcgagccccatgggtggagcaggagggccctgaatattgggaggaggagaccaggaatacaaaagctcacgcacagactgaccgcatgaacctgcagactctacgcggttattacaatcagtctgaggcaaacccacctaaaacccatgttacccatcatccagttttcgactacgaggccaccctgcgatgctgggcactcggcttttacccagcagaaatcatcctgacgtggcagcgagacggcgaagaccagacccaggatgttgagttggtggagacccgccccgccggggacggcacgtttcagaagtgggcggctgtagtggtgccctcaggagaagagcaacgctacacatgccatgtgcaacatgagggcctgcccgaaccactcatgctgcgatggaaacagtccagtctacccaccattcctatcatgggcattgtagccgggctggtggtgctggcggccgtcgtcactggagcagccgtagccgcagtgctttggcggaaaaaatcctcagactag

SEQ ID NO: 345626 - DNA, 465 bp, Artificial Sequence
  derived and/or modified sequence
atggtggtgatggccccccggaccctgttcctgctgctgagcggcgccctcaccttaactgaaacctgggcaggatcacattccatgcgctatttcagcgctgccgtttctcggccggggagaggcgagccacgatttatcgccatgggatatgtggacgacacacagttcgtccgcttcgactctgactcggcttgccctcgaatggagccaagggcaccatgggtggagcaggagggacccgagtactgggaagaagagacaagaaataccaaggcacacgctcagaccgacagaatgaacttgcaaactttaagaggttactataatcagtcagaggcaaagcaaagttctctacctaccatcccaatcatgggcatagtagccggtctcgtagtgttggccgccgtcgtgactggagccgcagtggccgccgtcctctggcggaagaaatcgagcgactag

SEQ ID NO: 345627 - DNA, 741 bp, Artificial Sequence
  derived and/or modified sequence
atggtggtgatggccccccggaccctgttcctgctgctgagcggcgctctgaccttaactgagacctgggctggctcccacagtatgagatacttctccgcagcagtctccagaccagggagaggcgagcctcggttcatcgccatgggatacgtggatgatacccagttcgtcaggtttgactcagactctgcttgcccaagaatggagcctcgggctccctgggtggaacaggaaggaccggagtattgggaagaagagacccggaacacaaaggcccatgcccagaccgatcgcatgaacttgcaaaccttacggggctattacaaccagtctgaggccaatccacctaaaacacacgtcacgcaccacccggtttttgattacgaggccactctgaggtgttgggcgctcggcttttatcccgctgagataattttgacgtggcagagggacggagaggatcaaactcaggacgtggagctggtcgagacaaggcccgccggtgatggaacatttcagaagtgggcagctgtcgtggtgccatccggtgaggaacaacgatatacctgtcatgttcaacacgagggcttacccgagccccttatgcttagatggaagcagtcttccctgccgacaatcccaataatggggattgtcgccgggttggtggttttggccgcagtcgtaacgggcgcagccgtggctgccgtcttgtggagaaagaagtcatcagactag

SEQ ID NO: 345628 - DNA, 741 bp, Artificial Sequence
  derived and/or modified sequence
atggtggtgatggccccccggaccctgttcctgctgctgagcggcgcgctcactctaaccgagacatgggctgggagtcacagtatgcgttacttttctgcggcagtctcacggccaggaaggggagaaccccgcttcatcgccatggggtatgtggatgacactcagttcgtgcgctttgacagtgacagtgcatgcccccgcatggagccccgagccccctgggtagagcaggaggggccagagtactgggaggaggagacccgcaataccaaggcccacgctcagaccgatcggatgaatttacagaccctgaggggctactacaaccaatcagaagcaaatcctccaaaaacgcatgttacccatcatcctgtgtttgactatgaagcaacactgagatgttgggccctgggtttttatcctgcagaaattattcttacctggcagcgggatggagaggaccagacccaggatgtcgaactggtagagacgaggcccgccggagatgggactttccagaagtgggccgccgtggtggtgcccagtggtgaggagcagagatacacgtgtcatgtgcagcacgagggactgccagagccactgatgctgcggtggaagcagtccagcttgcctactattcccataatgggtatagttgcaggactcgtggtacttgccgccgtcgtgaccggcgccgcggtagcggcagtcttatggcggaaaaaatctagtgactag

SEQ ID NO: 345629 - DNA, 741 bp, Artificial Sequence
  derived and/or modified sequence
atggtggtgatggccccccggaccctgttcctgctgctgagcggcgccctgacgctcacggagacttgggccggctcccactccatgcgttacttctcagcggccgtgagcaggcctggccgaggagagcctaggttcattgcaatggggtatgtggacgacacccaatttgtacggtttgattccgattccgcttgtccaaggatggagcctcgcgccccatgggtggagcaggaaggtcccgagtattgggaggaagagacccgcaataccaaggcgcatgcccagacagatcgcatgaatctgcagacgctaaggggttattacaaccagtctgaggccaacccacctaagacccatgttacacaccacccagtattcgactacgaagcaaccttgcggtgctgggcattaggtttttaccctgctgagatcattttaacctggcagagggacggtgaagaccagactcaagatgtggaactggtggagacaagacccgccggtgatggaaccttccagaaatgggctgcagtggtggtgccctctggagaagagcagaggtatacctgccatgtccaacacgaaggactgcccgagcctctgatgttgaggtggaagcagagctccttgcccaccattccaatcatggggatcgtcgctggcctagttgtcctcgccgctgtggtcaccggagcagcagtggccgccgtactgtggcggaaaaagagttcagactag

SEQ ID NO: 345630 - DNA, 741 bp, Artificial Sequence
  derived and/or modified sequence
atggtggtgatggccccccggaccctgttcctgctgctgagcggcgcattgactctgaccgaaacttgggccggttcccattccatgcggtatttttccgcagctgtgtctcggcctggacgcggggagcctcgcttcatcgccatggggtacgtcgacgatacccagtttgtccgcttcgattccgactcggcctgcccccgcatggaaccgagggccccgtgggtagagcaggagggtcccgagtattgggaggaggagactcgaaatacaaaagcccatgcacagactgaccgcatgaacttgcagactcttagaggctactacaaccaatccgaggcaaacccaccaaagacccacgttacacaccatcctgtcttcgattatgaagcaacccttagatgctgggctttaggattctaccccgccgaaatcatactgacatggcagagggacggcgaggaccaaacccaagacgtggagctggtggaaacaaggcccgctggagacggtacgtttcagaagtgggccgccgttgtggtcccatccggagaggaacagaggtacacttgccatgtgcagcacgaaggtctccctgagcctctgatgctccggtggaagcagtcgtctctcccaactattcctattatgggcattgtcgccggcctggtcgtgctcgcggccgttgttaccggtgcagctgtcgcagcagttctgtggcggaagaagagttccgattag

SEQ ID NO: 345631 - DNA, 741 bp, Artificial Sequence
  derived and/or modified sequence
atggtggtgatggccccccggaccctgttcctgctgctgagcggcgcactgacgctcacagagacttgggccggcagccactcaatgcggtacttctccgccgccgtgagtcgccccggccggggagaaccgcgattcatcgcgatggggtatgttgacgatacccagttcgtgaggttcgattccgattcggcatgcccccggatggaaccaagagccccatgggtagaacaggaaggccctgagtactgggaggaagagacaagaaataccaaggcccacgcgcagacagaccgaatgaacctacagactctgcgcggctattataatcagagcgaggccaatcctcctaagacccatgtgacccatcatcctgtgttcgattatgaggccacattacggtgctgggccttggggttttacccagccgagattattctgacttggcagcgcgatggagaagaccagacgcaggacgtggagctggttgaaacaaggcctgcaggcgacggaacgtttcagaagtgggctgccgttgtcgtccccagcggtgaggaacaaagatatacctgtcacgttcagcacgaggggctaccagagcccttaatgctccgctggaaacagtctagcctaccaaccatccccattatgggcatcgtcgctggacttgtggtgttggcagcagtcgtgacaggtgccgctgtcgccgctgtactctggcggaagaaatctagtgactag

SEQ ID NO: 345632 - DNA, 741 bp, Artificial Sequence
  derived and/or modified sequence
atggtggtgatggccccccggaccctgttcctgctgctgagcggcgccctaacactgacagagacttgggctggcagtcacagcatgcggtattttagcgccgccgtgagccggcctgggagaggagaacccagatttatcgcaatgggatatgtcgatgatacccagttcgtgaggttcgattcggactctgcctgtcccaggatggaaccacgagcaccctgggtggagcaggagggccctgagtactgggaagaagaaactcgcaacaccaaagctcatgctcagacagatcggatgaacctccagactcttcgcggttactacaaccagagtgaagccaatccgcctaagacccatgtgactcatcaccctgtgttcgattatgaggcaactctgcggtgttgggctctgggcttctatcccgcagagatcatcctgacctggcagagagatggtgaagaccagactcaggacgtagaactggtcgaaactagaccagcgggcgacggcaccttccagaagtgggccgccgtagtggtaccgagcggagaagagcagcggtacacctgtcacgtgcagcatgaggggttgcctgagcctttgatgcttcggtggaaacagagttccctgccaaccatccctataatgggaattgtggccggactggtggtcctcgccgccgttgttactggtgctgcagtcgcagcagtgctgtggcgaaagaaaagctccgactag

SEQ ID NO: 345633 - DNA, 888 bp, Artificial Sequence
  derived and/or modified sequence
atggctgtgatggccccacgcactttgctgctcttgctgctcggagcgctcgccttaacgcagacctgggccggatctcacagcatgaggtatttcaccacaagtgtctccagaccaggccgtggcgaacctcggttcatcgccgtgggctacgttgacgacacgcagtttgtgagattcgactcagatgccgctagtcaacgcatggaaccaagagctccctggattgaacaggagggacccgaatactgggaccttcagacccgcaacgtcaaggcccagagccaaactgatcgggcttatctcgagaacggcaaagagacactccagagaacagacgcaccaaagacgcacatgactcaccatgctgttagcgaccatgaggctacgctacgttgctgggctctgtctttttatcctgccgaaattaccctcacatggcaaagagatggagaagaccagacacaggatacagagctggtcgagacgagacccgctggcgatgggacttttcagaagtgggcttccgtggtggtaccaagcggccaagaacagaggtatacctgtcacgtgcagcatgagggactgcctaagccactaaccctgcgttgggagcctagcagccagcctaccatacccattgttggcataatcgcaggcctggtgctcttcggagcggtgttcgccggtgccgtggtcgcggcagtgcgctggcgcaggaaaagttctgggggagaaggcatgaagggtgggagtgaaatcagctgtttgactgagggaagcaagacccaagtggaagtgtgtccggcatccctattaggttctaccatccacaattacggtccgactcagcctggcccatgtgtccctgcccttactctgctgtag

SEQ ID NO: 345634 - DNA, 888 bp, Artificial Sequence
  derived and/or modified sequence
atggccgtcatggcgccaaggactctgctgttactgttactgggggctctagcactaacccagacctgggccggttcccactccatgcgctacttctttacaagcgtgtctaggccgggaagaggggaacccagatttatcgcggtcgggtacgttgatgatacgcagttcgttaggtttgatagcgacgccgcaagccaaagaatggaaccacgcgcaccgtggatcgagcaggagggcccagaatattgggaccaggagactcgcaacgttaaagcccactcacagaccgaccggagatacctggaaaatggaaaggagactctccagcggacagatgctcctaaaacacacatgacccatcatgccgtgtctgaccacgaggcaacactacggtgctgggccctctcattctatcccgctgagattaccctcacatggcaacgagatggcgaggaccaaacccaagacactgaattggtagagactcggcctgcaggagacggcactttccaaaaatgggcaagcgtggtggtgccgtcaggtcaggagcagcgatacacttgccatgtacagcacgagggtctccccaaaccattaacattgcgatgggagccgtcctcgcaacctacaattcctatagtggggattatcgctggcctggtgctgttcggagctatgttcgctggagccgtggtcgctgctgtccgctggcgccgaaagagcagtggaggggagggaatgaaaggcggatctgaaatttcctgcctcactgaaggaagcaagacacaggtcgaagtgtgcccggcttccctgcttgggtcgacgattcataactacggccctacccagcctggcccatgcgtgcccgcactcaccctcctctag

SEQ ID NO: 345635 - DNA, 888 bp, Artificial Sequence
  derived and/or modified sequence
atggctgtcatggcgccacgaacattggtgttactgctgtctggcgcactcgcacttacccagacatgggccggtagccatagcatgagatacttctatactagcgtgtcgcgtcctgggaggggtgagcctcgctttatcgccgtgggatatgtggacgatacacagtttgtccgcttcgactctgacgcagcttctcaaagaatggaacctcgcgcaccatggatcgagcaagaggggccagagtactgggaccgcaacacaagaaatgtcaaagcccattctcagactgacagggcctacctggagaatggaaaggaaacccttcaacgcaccgacgctccaaagacacacatgacacatcacgctgtgagtgaccatgaggccacgttgcgctgttgggctctgagcttctacccggcagaaatcactctgacatggcagcgggacggagaagaccagacgcaggatactgaactcgtggagacacgaccagctggcgatggcacgtttcagaagtgggcgtctgttgtggtgccatccggccaggaacaaagatacacctgccatgtccagcatgagggcctgcccaaaccattgaccctgcgatgggaaccttcaagtcagccaaccatccccatcgttggtataatcgcaggcctggtgttgtttggcgcagtgatcgcgggagccgtggtggctgcggtgatgtggcgacgcaaaagctccgggggtgaaggaatgaaaggaggaagcgaaatctcatgtctgaccgaggggagcaaaacgcaggtcgaggtgtgtccagccagcctcctgggttcgaccattcacaactacgaacctacccaacccggtccgtgtgttccggctctgactctgttgtag

SEQ ID NO: 345636 - DNA, 1050 bp, Artificial Sequence
  derived and/or modified sequence
atggctccaaggagcttgctgctgcttttgtctggtgcactcgccctaaccgacacttgggctggatctcactccttgcgctatttttctaccgccgttagcaggcctggccgaggagaaccacgctacatcgcggtggagtatgtcgatgatacccaattcctgcgtttcgatagcgatgctgccatccctcgaatggaacccagggagccctgggttgagcaggagggcccacagtattgggaatggaccacgggttacgccaaggccaatgcacagaccgatagggtggctctacggaacctgctgaggcggtatctggagaatgggaaagagaccctgcagagagcagacccaccaaaggcgcatgttgctcatcatcccattagtgaccatgaggcaaccctgcggtgctgggcccttggcttttaccccgctgagattactttaacatggcaaagggacggagaggagcagacacaagacacagaactcgtggaaactaggccagcgggagacggtacctttcagaagtgggctgccgtggtggtgccacccggagaggaacagcgatacacatgtcatgttcagcacgagggactgccacaaccacttattctgcgatgggagcagtccccacagcctacaattccaatcgttggaatcgtggctggcctggtcgtgttgggagccgtggtgacaggggctgtagtggccgctgtgatgtggagaaagaagagctccgaccggaatcgtgggtcatactctcaggctgccgcttactccgtggtgtccggaaacctcatgatcacctggtggtcgagtctgtttctgctgggggtcctgtttcagggctacctgggttgcctgcgatcccacagcgtattggggaggcgtaaggcacagctgctcagcgtttctacttcccaaacatctatcttaatacaagaacaattctcccaccagaggactctggccatgtccggtaagatgttctgctgtcatgactggtctgaggaggaggtgcttccggctagctgcggagaatag

SEQ ID NO: 345637 - DNA, 1050 bp, Artificial Sequence
  derived and/or modified sequence
atggcacccagatcactactgctcttgctcagtggagcccttgctctaacggatacctgggctggcagtcatagcctgaggtatttttctaccgccgtgagccgcccaggaagaggagaacccagatacattgctgtcgaatacgttgacgacacacaatttctgagatttgacagcgacgctgccattcccaggatggaacctagggagccatgggtggagcaagaaggtcctcagtactgggaatggaccactgggtatgccaaagcgaacgctcagacggatcgggtggcgctgcgaaatctgcttagacgctatctggagaacggcaaagagaccttacagcgcgcagatcctcccaaggctcatgtcgctcatcatccaatctccgaccacgaagcaaccctacgatgctgggctctggggttttatccagccgaaattactttgacatggcagagggacggtgaagaacaaacacaagataccgaactggtggagacccggccagctggggatgggaccttccaaaaatgggccgctgttgtggtgccgagcggcgaagagcagcgttatacatgtcacgtgcaacatgaaggtctgcctcagccactcatcctgcggtgggagcaaagccctcaaccaacaattcctatcgtcggcattgtagcgggacttgtcgtcctgggcgctgtcgtgactggagctgtggtagccgcagtgatgtggaggaaaaaatctagtgacagaaaccggggatcgtatagccaagccgcagcgtacagcgttgtttccgggaatctgatgatcacctggtggtcatctttgttcctgctcggcgtactcttccagggttacctaggatgcctgcgttcccattctgtgcttggacggcgtaaggctcagctactgtcggtgagcacttctcagacctctatcctcatccaggagcaattcagtcaccagagaactctggccatgagcggaaagatgttctgctgccacgattggagtgaggagaaagtgctgccagcttcctgcggcgagtag

SEQ ID NO: 345638 - DNA, 1050 bp, Artificial Sequence
  derived and/or modified sequence
atggcccctcgcagccttctgctgttgttgtctggggctctcgccctcacagacacgtgggccggaagtcacagtctcagatatttctccaccgcagtttctaggcccggaagaggagagcccaggtacattgcggtggagtacgtagacgacacccagtttctcagattcgacagtgacgccgctattccccgtatggaacccagagagccctgggtggaacaggagggtccccaatattgggagtggactactgggtatgcgaaggcaaacgcacagaccgatagggtggcgctcagaaatctgctgagaagataccttgaaaatggcaaggagactcttcagcgagcagacccccctaaagctcacgttgcccaccacccgatcagtgaccacgaggcgaccctgagatgttgggccctcggcttctatcccgcagagatcactctgacatggcaacgagatggcgaggaacaaacacaggacacagaactggtggaaacaaggcccgctggtgatggcactttccaaaagtgggcagcggttgtggtcccctcgggcgaggaacagcggtacacatgccatgtccagcatgaaggtctgcctcagccattaatcctaagatgggaacagtcaccacagcctaccatccctatcgtggggatcgtcgccggtctggttgtgctgggagcggtggtcaccggggcagtggtcgctgcagtgatgtggcgcaagaagagctcggataggaacaggggatcttactcccaggccgctgcttactccgttgttagtggcaacttgatgatcacctggtggagttccttgttcctgttaggggtgctctttcagggttatctcgggtgcttgaggagtcactctgtgctggggagaaggaaagcacagctcctttccgttagtacaagccagaccagcatattaatccaggaacagttttcacaccaaaggacccttgcaatgtcgggaaagatgttctgttgccatgactggtccgaggaaaaggtacttccagcctcctgtggagaatag

SEQ ID NO: 345639 - DNA, 1050 bp, Artificial Sequence
  derived and/or modified sequence
atggcaccaagatccttgcttctactcctatccggagccctcgcactaactgatacatgggcaggctcgcactcccttaggtacttcagcactgccgtttcccgaccaggccgaggtgaacctagatatatagccgtggagtacgtggacgatactcagttcctgaggttcgacagcgatgctgcgatacccagaatggaaccaagggagccttgggtggaacaagaggggccacagtattgggagtggacaaccggatacgcaaaggctaatgcccaaactgaccgcgttgcgctgaggaatctgctgcggagatacttggaaaacggaaaagaaaccctgcagcgagccgatcccccaaaggcccacgtggctcatcaccctatttccgatcacgaagccacccttcgctgctgggctctgggattttaccctgccgagatcaccctcacttggcaacgagacggcgaagagcagactcaggacacagaactggtggagactaggcctgctggcgacggcacttttcaaaagtgggccgcagtcgtggtaccgagcggagaagagcagagatatacctgccatgttcagcatgagggactgccacagccattgatattgcgttgggaacaatccccccagccaaccatccccatagtgggtatagtggccggactggtggtactaggtgctgtggttacaggtgcagtggtggccgctgtgatgtggcgcaagaaaagctccgaccggaaccgaggcagctactcccaggcagccgcatactctgtagtcagcggtaacctcatgattacatggtggagctcactatttcttctgggagtgttgttccagggttacctcggctgcctgagaagccactctgtgctcgggagacggaaagcccaattactctctgtgtctacctctcagaccagtatcctgattcaagagcagttttcgcaccaacgaactttggccatgtcgggaaagatgttttgctgccacgactggtcggaggagaaggtcttacctgcctcctgtggcgagtag

SEQ ID NO: 345640 - DNA, 1050 bp, Artificial Sequence
  derived and/or modified sequence
atggctccgaggagcctgttgcttttgttatcaggcgctcttgcactgaccgatacatgggctgggtcccactccctcagatacttctcgaccgctgtgagccgtccgggtcggggagaacctcgatacatcgccgtagagtacgtagatgacactcagttcttgcggtttgacagtgacgcggcaattcccaggatggaacccagggagccctgggtggagcaagaaggtcctcagtactgggagtggaccaccggatacgcaaaagctaacgctcaaactgatcgagttgccctccggaacctcctccgcagatacctagaaaacggtaaggaaactctccaaagggccgatccaccgaaagcacatgttgcgcaccacccaatatcagaccatgaagctacacttcgatgttgggcactggggttttatcctgctgaaatcacgcttacatggcagcgcgatggtgaggagcagacccaggataccgaattggtggaaaccaggccggctggagacgggaccttccagaaatgggctgctgtggtggtgccaagtggcgaagagcagcgctacacctgccacgtgcaacacgagggtctgccccagccattgattttgcgatgggagcagtccccacagccaaccatccccatcgtgggaattgtcgccggtcttgtcgtgctgggcgctgttgtcaccggtgccgtggtcgcagctgtgatgtggagaaagaagtcgtccgatcggaatcggggttcatattcccaagctgccgcttactctgtggtgtcagggaacctgatgatcacttggtggtcctctctgttcctcttaggtgtactgttccaaggctacctcggttgcttgcgcagccattcggtccttggtcggaggaaggcccagctactgtcagtctccacttcacagacatcaatactgatccaggagcagttttcccatcaacggaccctcgccatgtccggtaagatgttctgttgccacgactggtccgaggaggaggtactcccggctagttgcggagagtag

SEQ ID NO: 345641 - DNA, 465 bp, Artificial Sequence
  derived and/or modified sequence
atggtggtcatggctccgcgaacccttttcctgttgctttcaggcgctctcacactcaccgagacttgggctggctcccatagtatgagatattttagcgccgctgtgagtcgcccaggcagaggggaacctagattcatcgccatgggttacgtggacgatacccagttcgtgagattcgattctgattccgcttgtccaaggatggaacccagggctccctgggtggagcaggagggccctgagtattgggaagaagaaactcggaacaccaaggcacatgcacagactgatcggatgaatctgcagaccctgcgcggttactataaccagtcagaggcaaagcagtcatctctgccaacaataccaatcatgggaatcgtggctggcctggtggttcttgcagcagttgtgacaggggcagcagtggccgctgtattatggcggaaaaaatcctccgactag

SEQ ID NO: 345642 - DNA, 741 bp, Artificial Sequence
  derived and/or modified sequence
atggtcgttatggcaccaaggacactatttctgctactcagtggggctcttaccctgactgagacatgggctggcagtcattccatgcggtactttagtgctgctgtgagtcggccaggcagaggagagccccgattcatagcgatgggctacgtagacgacacacagtttgttcgcttcgatagcgacagcgcttgtccacgcatggagccacgggcaccgtgggtcgagcaggagggcccagaatattgggaggaagagactagaaataccaaagcccacgcacaaacagaccggatgaatctgcaaaccctgcgagggtattataaccagtcagaagccaaccccccaaagacgcacgtgactcaccatcccgtattcgactacgaggcgactctgcgatgctgggccctggggttttatcccgctgaaatcatccttacctggcaaagagatggagaggaccaaacccaggatgtggaattagtggaaactagaccagcgggagatgggaccttccaaaaatgggccgctgtcgtggtgccgagcggggaagagcaacgctacacttgccatgtgcaacacgaaggcctccctgagccattgatgttgcgctggaaacagagctccctccccacaatccccataatgggtatcgtcgcaggcctcgtggtgcttgccgctgtggtcacaggggcagcggttgctgctgtgctgtggcgcaagaaatcctcagattag

SEQ ID NO: 345643 - DNA, 465 bp, Artificial Sequence
  derived and/or modified sequence
atggttgttatggcccctcgcaccctttttttgctgctctcaggcgctctcacgttgacagagacgtgggcgggaagccatagcatgcgatatttttccgccgcagtgagccggcctggccgaggcgaacctcggttcatcgcgatgggatatgtcgatgacactcagtttgtgaggtttgacagtgactcagcatgtccacggatggaacctagggccccatgggtggaacaggaaggcccagagtattgggaagaggagacgaggaatactaaagcacacgcccagactgatagaatgaacctgcagaccctcaggggttactataatcagtccgaagctaagcagtccagcctgcctactattcccattatgggaatcgtggctggccttgttgtgctggccgctgtcgtaacaggcgctgctgtggcagccgttctgtggaggaagaaaagcagcgattag

SEQ ID NO: 345644 - DNA, 741 bp, Artificial Sequence
  derived and/or modified sequence
atggtcgttatggccccaagaacactcttcttgctcctgagtggcgcactgaccctcacagaaacgtgggccggtagtcactccatgcgttacttcagtgccgctgtttctaggccaggcagaggtgagccaagattcatcgcaatgggttacgttgatgatactcagtttgtccggtttgacagtgactccgcctgcccacggatggagccccgagcaccctgggtagaacaggagggacccgagtattgggaggaggaaacaaggaacaccaaggcacacgctcagaccgatagaatgaatctgcagactcttcgcggatattacaatcagagcgaagcgaatccgccaaaaacacacgtgactcaccatcctgtgttcgattacgaggcaacactccgatgttgggccctaggcttctaccctgcagagatcatacttacatggcagagagatggtgaggaccagactcaagacgttgaactagtggaaacccgacctgccggtgatggtaccttccagaaatgggccgcagtagttgtgccctctggagaggaacagaggtacacctgtcatgtccagcacgagggcctgccagaacccctgatgctacgctggaaacagtcctcccttcctaccataccaattatgggcatcgtggcaggcttagtagtgcttgccgcagtcgtcactggggctgctgtcgccgcagtgctgtggcggaaaaagtctagtgattag

SEQ ID NO: 345645 - DNA, 741 bp, Artificial Sequence
  derived and/or modified sequence
atggtggttatggctccacggaccctcttcttgttgcttagcggcgctttaaccctgaccgaaacgtgggctggcagtcactcaatgcggtacttttccgcggctgtcagtcgtcctggtcgtggggaaccaagattcatagcgatggggtacgtcgatgacacccaatttgtgcggttcgactctgatagtgcgtgcccaaggatggaaccgcgagctccttgggtggagcaggagggaccggagtactgggaagaagagacacgcaataccaaagcccacgcccagaccgaccgtatgaacctccagacactgcggggttattataatcaaagcgaggctaatccaccgaagacccacgtcacccatcatccggtgttcgactacgaagctaccctacgatgttgggcgcttggcttttatccagccgagataatcctgacttggcagcgagatggggaggatcagacccaggacgttgagttagtggaaacgagaccggcaggtgatgggaccttccagaagtgggctgcggttgtggttccgagtggagaggagcagaggtacacttgccacgtccagcacgaggggctccctgaacctctgatgctgaggtggaaacaaagctcactgccgaccatccccattatgggtattgtggcaggcttagtggtactggctgcagtcgtaaccggggcagccgtggccgctgtgctatggaggaagaagtcatccgactag

SEQ ID NO: 345646 - DNA, 465 bp, Artificial Sequence
  derived and/or modified sequence
atggtcgtgatggccccacgcactctgttcctcctcctatccggcgcacttactcttaccgagacttgggccggatcacactccatgaggtacttcagtgctgctgtgtctagacctgggcgtggggagcccagatttatcgccatgggttacgtggacgatacccagttcgttagatttgattctgacagcgcttgcccgcgaatggagccacgagcaccctgggtggagcaggaggggccagaatactgggaagaagagacaagaaataccaaggctcacgctcagaccgaccggatgaacttacagacactgcggggttattataatcagtccgaagctaagcagagctctctgccaaccatccctattatgggcattgtggcaggtctcgtggtgttagcggctgttgtcactggcgcagcagtggccgcagtgctgtggcgcaaaaaatccagcgattag

SEQ ID NO: 345647 - DNA, 741 bp, Artificial Sequence
  derived and/or modified sequence
atggtggtcatggccccacggaccctctttctgttactgagcggagccctgacgctaactgagacttgggccggatcacacagtatgcggtacttctctgcagcggtaagcaggccgggaagaggtgagcctcgctttatcgccatgggctacgtggatgacacccagtttgtccgattcgactctgactcagcctgcccaagaatggagcctcgagcgccttgggtggagcaggagggcccagaatattgggaagaagaaacccgcaatacaaaagcccatgctcagaccgacagaatgaatctccaaaccctgagaggatactataatcagtccgaggcaaatccgccaaaaacacatgtgactcatcatcctgttttcgactatgaggctaccctccggtgctgggccctgggattttaccctgccgaaataattctcacgtggcagcgagatggtgaggaccagactcaagacgtggaactcgtggaaaccagaccagctggcgatggaaccttccaaaagtgggcagcggtggttgtcccttcaggggaagagcaaagatacacgtgtcatgtgcaacacgaggggcttcctgagccacttatgctgagatggaaacaaagcagcctgccgaccattccgattatgggcattgttgccggactggtcgtgctagcggcagttgtcaccggggctgctgttgcggctgtcttgtggaggaaaaagtcttccgactag

SEQ ID NO: 345648 - DNA, 465 bp, Artificial Sequence
  derived and/or modified sequence
atggtagttatggcccctcgaactctgtttttgcttctgtccggcgctctcacattgaccgagacttgggctggcagccactcaatgcgctatttttctgctgctgtgtctagacccggaaggggtgagcccaggtttatagcgatgggatacgtcgacgatacacagttcgtgcgttttgatagtgacagcgcatgcccacgaatggaaccaagagcgccatgggtcgaacaggagggtcccgagtactgggaggaagagactaggaacaccaaggctcacgcacaaaccgatcggatgaatctgcagactcttagaggttactacaatcagtccgaggctaagcagagctccctcccgaccattccaatcatggggatcgtcgcgggtctggtggtgcttgcggcagtggtaacaggagcagcagtggctgcagtcctgtggagaaagaagagctctgactag

SEQ ID NO: 345649 - DNA, 741 bp, Artificial Sequence
  derived and/or modified sequence
atggttgtgatggcaccacggacactcttcctgctcttaagcggcgcactaacgctcacggaaacctgggcaggaagccattctatgcgctatttctctgcagcagtgagccgcccagggcgtggggagcccaggttcatcgctatgggttacgtggatgatactcagtttgtgcgcttcgatagtgatagcgcatgcccaaggatggagcccagggcaccatgggtggaacaggagggacctgagtactgggaagaagaaactaggaatacaaaagcccacgcccaaacggatcgcatgaatcttcagacgctgcgcggttattataaccaaagcgaagctaatccccctaagacacatgtaactcatcacccagtcttcgattacgaagctaccttgcgctgttgggccctgggattttatcccgctgaaatcattctgacttggcaacgagatggagaggaccagacacaagatgtcgaactggtggagacccggcctgctggagatggcacgttccagaaatgggcggctgtagtggtgcctagcggggaggaacagaggtacacatgccacgttcagcacgaaggtctgcccgaacctttgatgctgaggtggaagcagagtagtcttccgactatcccgatcatgggcattgtggccggacttgtggtgctggcagcagtggtcacaggagccgcagtggctgcagttctctggcgtaagaaaagttctgattag

SEQ ID NO: 345650 - DNA, 741 bp, Artificial Sequence
  derived and/or modified sequence
atggtagtgatggctccccgaacactgtttctgttactgtccggtgctctgacactcacggagacttgggccggaagtcactctatgcggtacttttccgcagctgtgagtaggcctggaagaggagaacctcggttcatcgccatgggatatgtggatgacacccaattcgtacgatttgactctgacagtgcatgtccaaggatggagcccagagcgccttgggtggaacaagagggcccagaatactgggaggaagagaccaggaacaccaaagcccacgctcagacagacaggatgaatctgcagacattaaggggctactataaccagagcgaggctaatcctcccaaaacccacgtcactcatcaccccgtgtttgactacgaggccacgctgcgatgttgggccctgggcttttaccccgcagagattattctcacttggcaaagagacggggaagatcagactcaagacgtggagttagtggagacaagaccagcaggggacggaacattccagaaatgggcagccgtagtggtgccatctggagaagagcagagatatacttgccatgttcagcatgagggcctgcccgaaccactgatgctgaggtggaagcaatccagccttcctacaattcccataatgggcattgtagcaggactggtcgtgcttgctgctgtggttactggcgctgcagtggccgcagtgctttggcggaagaaaagcagcgactag

SEQ ID NO: 345651 - DNA, 465 bp, Artificial Sequence
  derived and/or modified sequence
atggtggttatggccccacgtaccttatttctcctgctgtctggtgctctcaccttaacagagacctgggctggttctcacagcatgcggtatttttctgcggcagtgagtagaccagggaggggcgaaccgaggtttatagccatgggctacgtcgatgacacacagttcgtccgcttcgactctgactcggcatgccctcggatggaacctagggctccttgggtggagcaagaagggccagagtattgggaagaagaaacacgcaacactaaggcgcacgcacagactgatcgcatgaacctgcagacgctgcggggatattataaccaatcagaagccaagcagagttcactaccaacaatccctatcatgggcattgtggctgggctggtcgtccttgccgctgtggttaccggggctgctgttgcagccgtgctttggagaaagaaatcatcggactag

SEQ ID NO: 345652 - DNA, 465 bp, Artificial Sequence
  derived and/or modified sequence
atggtggtgatggcccctcgcactctgttcctcctgttatcaggagcactcaccctcaccgagacatgggccggtagtcacagcatgcggtacttctccgcggctgttagccggcctggccgaggtgagccgaggttcatcgccatgggatatgtggatgatacgcaattcgtcagattcgactcagattccgcttgtcccaggatggaacccagggctccttgggtagagcaggaaggccctgaatactgggaagaagagactcgcaacaccaaagcacacgcccagaccgatcgtatgaatctccagaccttgcgcggttattacaatcaatccgaagccaagcagagcagcctaccgacaattcctatcatgggcatcgtggctgggctagtggtgctggctgccgttgtcaccggcgctgcagttgccgctgttctctggcgtaagaaaagttcagactag

SEQ ID NO: 345653 - DNA, 741 bp, Artificial Sequence
  derived and/or modified sequence
atggttgtgatggcccctaggaccctctttctgctgttgtcaggggcactgactctgacggaaacttgggcgggaagccactccatgagatatttctctgccgcagtgtcgagacctggtcggggtgagcctcgcttcattgccatgggatatgtggatgacacacagtttgtaagattcgattccgatagcgcttgtccgaggatggagcctagagctccttgggtagaacaggaagggcctgaatactgggaagaagagacacggaacacaaaagcacacgctcagacagaccggatgaaccttcagactctgcgaggctactacaaccagtccgaagctaacccaccgaaaacccatgtgactcaccatcctgtgtttgattatgaagctaccctgcgctgttgggccctcggattctaccctgccgaaatcatcctaacctggcaacgcgacggagaggatcagacacaagatgtcgagctggtcgagactaggcctgccggagatggcaccttccagaagtgggccgctgttgtggtgccctctggggaggaacaaagatacacatgtcacgttcagcatgagggactacccgagcccctaatgttgcgctggaaacagtcaagccttcctactatacccattatgggaatcgttgccggactagttgttcttgcagcggtggtgaccggtgccgctgtcgcagctgtgttgtggagaaaaaaaagttccgattag

SEQ ID NO: 345654 - DNA, 741 bp, Artificial Sequence
  derived and/or modified sequence
atggtagtgatggcgccacggaccctgttcctgctattaagcggcgcacttactctcacagagacttgggctgggagtcactctatgcgctatttttctgcagcagtatcacggcctgggagaggagagcccagattcattgctatgggttacgtcgacgacacccaattcgttaggttcgacagtgacagtgcatgccccaggatggaaccacgagccccttgggtagagcaggaaggacccgagtattgggaagaagagacacggaacaccaaggcccatgcgcagactgataggatgaacttacaaactttaagaggatactataaccagagcgaagcaaatccccctaaaacacacgtgacccatcaccccgtgttcgactatgaggctacgcttaggtgctgggcgctgggattttatcctgccgaaatcatcctgacttggcaacgagacggcgaagaccagactcaggacgtcgaattagtggaaacccgtccagctggagacggcacttttcagaagtgggcagctgttgtggtcccgagtggggaggagcaaaggtacacctgccatgtccaacacgaaggcctgcctgagcctttaatgctgagatggaagcagtcctcgctacctactatccccatcatgggaatcgtggccggtctcgtagtgctggcagcggtggttacaggcgctgcagtggccgctgtgctgtggaggaaaaaaagttcagattag

SEQ ID NO: 345655 - DNA, 465 bp, Artificial Sequence
  derived and/or modified sequence
atggttgttatggctccacggactttattcctccttctttcaggcgctctgaccctgacagagacgtgggcaggaagtcactccatgcgctatttctcagcggcagtctctcgccctgggagaggagagccccgtttcattgcaatgggatatgtagatgacacccagtttgttcgcttcgattccgattctgcctgcccccgaatggaaccacgggctccatgggtggagcaggaaggaccagagtactgggaagaggagactcggaacaccaaggcgcatgcgcagacagatcggatgaacctacagaccctacggggatactacaatcaatccgaagctaaacagtctagtctcccgaccatccccattatgggcattgtggctggacttgtggtcctcgccgcagtggtgacaggagccgctgtcgccgcagtactctggcgcaagaaaagctccgattag

SEQ ID NO: 345656 - DNA, 741 bp, Artificial Sequence
  derived and/or modified sequence
atggtcgtgatggctccacgaacgttgttcctcctgctgagtggcgctctcactttaactgagacatgggctggatctcactcaatgcgctatttttctgcggctgtaagcagacccggaaggggggagcccagatttatcgcgatgggatacgtcgacgatacccaatttgttcgctttgactccgacagcgcttgcccgagaatggaacccagggccccatgggtggagcaagaaggccctgagtactgggaggaggagacacgcaatacaaaggcgcacgcccagacagatcgcatgaatttacagactttgcggggttattacaatcagtcagaggcaaaccccccaaaaacccatgtaacacaccaccccgtattcgattacgaggccacccttcgctgctgggccctagggttctaccctgccgagattatcctgacttggcaaagagacggggaagatcagacccaggacgtggaattagtggagacgagacccgctggcgacggaacctttcagaagtgggcagctgttgtagtgccgtctggagaggaacagaggtatacatgccatgtgcaacatgagggtttgccagagcctctgatgctgcgctggaaacagtccagcctccccaccatccccatcatggggatagttgccggactggtcgtcttagctgccgtggttacaggcgcagccgtcgctgccgttctgtggagaaagaaaagtagtgactag

SEQ ID NO: 345657 - DNA, 741 bp, Artificial Sequence
  derived and/or modified sequence
atggttgtaatggctcccagaacactgttccttctcctctcaggcgcacttacactcactgagacatgggccggttcacacagcatgagatacttttcagccgctgtgagccgacctgggagaggggagcccagatttatcgcaatgggatatgtggacgatacacagttcgtgaggttcgactccgactctgcctgcccgagaatggagcccagagccccatgggttgaacaggaagggcctgagtattgggaggaagagacgcgcaatacaaaggcacacgcacagaccgacaggatgaacctgcagacacttagggggtactacaatcagtccgaagcaaacccacccaagacccacgtcacccatcaccctgtgttcgactatgaggctactttacggtgttgggccctgggattctaccccgcagagattatcttaacctggcagcgggacggggaggaccaaactcaggatgtcgagctggtagaaacacgccctgccggagacggcaccttccagaagtgggccgctgtcgtggtgcctagcggggaagagcagcggtacacctgccacgtacaacatgaagggcttcctgaacccttgatgctccgttggaaacagtcttctctaccaacaatcccaatcatgggtattgtggcaggtcttgtagtcctcgccgcagtcgtaactggggctgccgtggccgctgttctttggaggaaaaagtcctctgactag

SEQ ID NO: 345658 - DNA, 741 bp, Artificial Sequence
  derived and/or modified sequence
atggtcgttatggccccacgaacgctctttctcctgttgtccggagccttaaccctaactgagacatgggctgggtcccactcaatgaggtacttttccgcagcagttagccgtccgggaagaggcgagcctcgtttcatcgccatgggctatgtggatgacactcagtttgttcgttttgatagcgacagcgcatgcccccgaatggaaccaagggcgccatgggtagaacaggagggccctgagtattgggaggaggagacccggaacactaaagcccatgcacaaaccgaccgaatgaatcttcagacattgagaggatactacaatcaatccgaagccaatccaccgaaaacacacgtgactcaccaccccgtgttcgattacgaggcaaccctgcgatgttgggccttagggttttatccagccgagatcattcttacctggcagagagatggcgaggatcaaactcaggatgttgagctcgtggagactcggcctgccggtgacggcacgttccagaagtgggcagcagttgtagtgcctagtggtgaagaacagcgttatacctgtcacgtgcagcatgagggtttacccgaaccacttatgcttagatggaagcagagttcactcccgaccatccccatcatgggaatcgtggcgggactcgttgtgttagctgcggtggtcactggtgctgcagtcgctgctgttctttggcgaaaaaaatcatctgattag

SEQ ID NO: 345659 - DNA, 741 bp, Artificial Sequence
  derived and/or modified sequence
atggttgtgatggcgcctcgcactctgttcctgcttctttctggcgcactcacgcttaccgagacatgggcaggaagtcattcgatgcggtatttttcagctgccgtgagccgcccaggaaggggggagccccgtttcatagccatgggatatgtggatgacacccagttcgtgcgctttgattctgactcagcttgtccccgtatggagccgcgagctccatgggtggaacaagaggggcctgagtattgggaagaggaaactcgtaataccaaggctcacgcccaaactgatcggatgaacttacagaccctgagaggctactacaaccagtccgaagcaaaccccccaaagacacatgttactcaccacccagtttttgattatgaggccacgctccgctgttgggcgctgggtttttacccagccgaaattatcctgacctggcaaagggacggtgaggatcaaacccaggacgtcgagctggtcgaaactagaccggcaggagacgggaccttccagaaatgggccgctgtcgtcgtgccaagcggagaggagcagcggtatacttgtcacgtacagcacgaaggcctgcccgaaccgctgatgctccgctggaagcagtcctcactgcctacaatcccgataatgggaatagtggcagggctagtagtgctagcggcagtggttaccggagccgctgtggcggctgtgctgtggcggaaaaagagcagtgattag

SEQ ID NO: 345660 - DNA, 741 bp, Artificial Sequence
  derived and/or modified sequence
atggtcgttatggcccctcgaacattgttcctgctgctatccggagccctgaccctgacagaaacgtgggcagggtcccattcaatgcggtatttctccgccgcagtgtcccggcctggcagaggtgaacccagattcatagccatgggttatgtcgacgatacacagtttgtcagatttgatagtgattctgcctgccctagaatggagccgagggccccatgggttgaacaggaagggccagaatactgggaggaggagactaggaacaccaaagcacacgctcagaccgatcgcatgaatttgcagacacttaggggctactacaaccagagcgaagccaaccctccgaaaactcacgtgacccatcatccagtcttcgattatgaagctaccctgagatgctgggcccttggcttttatccagctgaaatcatattgacctggcaaagggatggggaagatcagactcaggacgttgaactggtggaaacgaggccagcgggagatggaacattccagaagtgggcagcggttgtcgtcccatcaggtgaagaacagcgttacacatgccatgtacaacacgaaggtcttccagaacccctgatgttacgatggaaacagtcttctctgcccactatccccatcatgggcatcgtggccggtctggtggttctggcagccgtggtgaccggggctgcggtcgccgctgtgctctggaggaaaaagtccagcgactag

SEQ ID NO: 345661 - DNA, 741 bp, Artificial Sequence
  derived and/or modified sequence
atggtagtgatggctccgaggacactattcctactgctctcaggcgctttgaccctgaccgaaacatgggccggtagccactcaatgcgttactttagtgccgcagttagccgccctgggaggggtgaacctcgctttatagcaatgggctacgtggatgacactcagttcgtccgatttgactctgactccgcatgccctaggatggaaccaagggccccatgggtagagcaggagggccctgagtattgggaagaagagacgcggaatacaaaggcacacgcccagaccgaccggatgaatcttcaaaccttgcgaggttattataatcagagcgaggccaacccgcctaaaactcacgtcacacaccacccagtgttcgattacgaggcgactctgcggtgttgggcacttgggttttaccccgctgaaattatccttacttggcagcgcgatggggaggatcagacccaggacgttgaactggtcgaaacaaggcctgccggtgacgggacattccagaaatgggccgctgtggtggtcccttctggggaagagcaaagatatacatgccacgtgcagcatgagggccttccagagcctctcatgcttcgctggaaacagtccagtttgcctacaatacctattatgggaatcgtcgctggcctcgtggtgctcgccgcagtagtcacaggggcagctgtcgccgctgttctttggcggaaaaaatctagcgattag

SEQ ID NO: 345662 - protein, 145 aa, Artificial Sequence
  derived and/or modified sequence
MAQPPRLSRSGASSLWDPASPAPTSGPRPRLWEGQDVLARWTDGLLYLGTIKKVDSAREVCLVQFEDDSQFLVLWKDISPAALPGEELLCCVCRSETVVPGNRLVSCEKCRHAYHQDCHVPRAPAPGEGEGTSWVCRQCVFAIAT

SEQ ID NO: 345663 - protein, 567 aa, Artificial Sequence
  derived and/or modified sequence
MAQPPRLSRSGASSLWDPASPAPTSGPRPRLWEGQDVLARWTDGLLYLGTIKKVDSAREVCLVQFEDDSQFLVLWKDISPAALPGEELLCCVCRSETVVPGNRLVSCEKCRHAYHQDCHVPRAPAPGEGEGTSWVCRQCVFAIATKRGGALKKGPYARAMLGMKLSLPYGLKGLDWDAGHLSNRQQSYCYCGGPGEWNLKMLQCRSCLQWFHEACTQCLSKPLLYGDRFYEFECCVCRGGPEKVRRLQLRWVDVAHLVLYHLSVCCKKKYFDFDREILPFTSENWDSLLLGELSDTPKGERSSKLLSALNSHKDRFISGREIKKRKCLFGLHARMPPPVEPPTGDGALTSFPSGQGPGGGVSRPLGKRRRPEPEPLRRRQKGKVEELGPPSAVRNQPEPQEQRERAHLQRALQASVSPPSPSPNQSYQGSSGYNFRPTDARCLPSSPIRMFASFHPSASTAGTSGDSGPPDRSPLELHIGFPTDIPKSAPHSMTASSSSVSSPSPGLPRRSAPPSPLCRSLSPGTGGGVRGGVGYLSRGDPVRVLARRVRPDGSVQYLVEWGGGGIF

SEQ ID NO: 345664 - DNA, 1704 bp, Artificial Sequence
  derived and/or modified sequence
atggcccagccccctcgcttgagtcgcagcggggcttccagcctatgggaccctgcctctcctgcacccacctcaggcccacgacctcggctctgggaggggcaggacgtgctcgcccgttggactgacggactgctttacctaggaactatcaagaaagtggattctgccagagaggtctgtcttgtgcagtttgaagacgacagtcagtttctggtgctgtggaaggatatttccccagccgccctacccggagaggaactcctctgctgtgtctgcaggagtgaaacagtggtgcctggtaaccggctagtgtcttgcgagaagtgtcggcacgcttaccatcaggattgtcacgtgccgagggcccctgcccccggtgagggcgagggaacctcttgggtgtgcagacagtgcgtctttgcgatagctaccaagagagggggagcactaaaaaagggcccttatgctagggcaatgctaggaatgaagctgtccctgccatatgggctgaaaggtttggactgggatgccggtcacctgtcaaatcgccagcagagctattgctactgcggagggccaggggaatggaacctaaagatgctgcagtgccgctcctgcttgcagtggttccacgaagcatgcacccaatgtctttcaaaaccattgctatatggtgaccgtttctacgaattcgagtgctgtgtgtgtagggggggcccggagaaggtacgtagactgcagttgaggtgggtggatgtggcacaccttgtcttgtatcacctgtctgtctgttgtaagaagaagtattttgattttgaccgtgagatcctgccttttacctcggaaaactgggatagcttgctcctcggcgagctgagcgacacccccaagggggaacgctcctccaagctcctcagtgcactgaactcccacaaggaccgtttcatcagcggcagagaaattaaaaagcggaagtgcctgttcggactgcatgctagaatgccacctcccgtagagcctccgacaggcgacggcgcacttacctctttcccatccggccagggccctggggggggggtgtctagacccctggggaagcgacggagaccagaacccgaacctctgagacgaagacagaagggaaaggtggaggaactgggtcccccgtcagcagtgagaaaccagcccgaacctcaggaacagcgggagcgggctcacttgcagcgcgccctgcaggcctctgtgtcacccccgagtccgtcccctaaccaatcctaccaggggtcttcgggatacaatttccgtcccaccgatgctcgttgcctgccctcctcccctatccgtatgtttgcgtcctttcatccatccgctagtactgcaggtaccagtggtgactccggacccccagacagatcacccctggagctgcatataggcttccctaccgacatccccaagagcgcgccccacagtatgacagcgtcctcctctagcgtttcttccccttcgcctggcctccctagaagatccgcccctccctcaccactttgccgtagcctgtctcccgggaccggcgggggcgtgcgtgggggggtgggatacctgagtagaggcgaccccgtgagagtgctggccaggcgggtcaggcccgacggctcggttcaatacctcgtagaatggggcggagggggaattttttag

SEQ ID NO: 345665 - DNA, 1704 bp, Artificial Sequence
  derived and/or modified sequence
atggcccagcccccccggctgagccgcagcggggccagcagcctgtgggaccctgccagccctgcccccaccagcggcccccggccccggctgtgggagggccaggatgtgctggcccgctggacagatggcctgctgtacctgggcaccatcaagaaggtggacagcgcccgggaggtgtgcctggtgcagtttgaagatgacagccagttcctggtgctgtggaaggacatcagccctgctgccctgcccggggaggagctgctgtgctgcgtgtgccgctcagaaacagtggtgcccggcaaccggctggtgtcctgtgagaagtgcagacatgcctaccaccaggactgccacgtgccccgggccccagcccctggagagggggagggcacctcctgggtgtgccggcagtgtgtgtttgccatcgccaccaagaggggcggggccctgaagaagggcccctatgcccgggccatgctgggcatgaagctgagcctgccctacggcctgaagggcctggactgggatgctggccacctgagcaaccggcagcagagctactgctactgcggcggccctggagagtggaacctgaagatgctgcagtgccgcagctgcctgcagtggttccacgaggcctgcacccagtgcctgagcaagcccctgctgtatggagaccgcttctatgaatttgagtgctgcgtgtgccggggcggccctgagaaggtgcggcggctgcagctgcgctgggtggatgtggcccacctggtgctgtaccacctgtctgtgtgctgcaagaagaagtactttgattttgaccgggagatcctgcccttcaccagcgagaactgggacagcctgctgctgggggagctgagtgacacccccaagggggagaggagcagcaagctgctgagcgccctgaacagccacaaggaccgcttcatcagcggccgggagatcaagaagaggaagtgcctgtttggcctgcacgccaggatgcctcctcctgtggagcccccaactggagatggagccctgaccagcttccccagcggccagggccctgggggcggcgtgtcccggcccctgggcaagagaagaagacctgagcctgagcccctgcggcggcggcagaagggcaaggtggaggagctgggccccccatctgctgtgaggaaccagcctgagccccaggagcagcgggagcgggcccacctgcagagggccctgcaggcctctgtgagcccccccagccccagccccaaccagagctaccagggcagcagcggctacaacttccggcccacagatgcccgctgcctgcccagcagccccatccgcatgtttgccagcttccaccccagcgccagcacagctggcaccagcggggacagcggccccccagacaggagccccctggagctgcacatcggcttccccacagacatccccaagagcgccccccacagcatgacagccagcagcagctctgtgagcagccccagccctggcctgcccaggagaagtgccccacccagccccctgtgccgcagcctgagccctggcactggaggcggcgtgcggggcggcgtgggctacctgagcagaggagaccctgtgcgggtgctggccaggagagtgcggccagatggctctgtgcagtacctggtggagtggggcggcggcggcatcttctag

SEQ ID NO: 345666 - DNA, 1704 bp, Artificial Sequence
  derived and/or modified sequence
atggcccagcccccccggctgagccggagcggcgccagcagcctgtgggatcccgcgtcgcctgcaccaacgagtggcccccgccccagactctgggaagggcaggatgtattggcccgatggacggatgggcttctgtacctgggcacaattaaaaaggtagattccgcaagggaggtgtgcttagtgcagttcgaagacgatagtcagttcttggttttgtggaaggacatttccccagctgcgctgcccggagaggaacttctgtgttgcgtgtgcagaagcgaaacggtagtgccaggcaacagactggtgagttgcgagaaatgccgacacgcctaccaccaagattgccatgtgccacgcgcacctgcacctggcgagggagagggaacaagttgggtctgtaggcagtgcgtattcgcaattgccactaagcgggggggagccttaaaaaaaggcccttatgccagagcgatgcttggaatgaagctgtcactcccttacgggctaaagggactggactgggatgctggccatctgtctaacagacagcagtcctactgctactgtggcggccccggtgagtggaacctcaaaatgcttcagtgccgcagctgccttcagtggttccatgaagcgtgtacccagtgcctgagcaagcctctcttgtatggcgacaggttctatgaatttgaatgttgcgtgtgtcgaggaggccctgagaaggtgaggaggctacagctgaggtgggtcgacgtagcacacctagtactgtaccatctgagcgtttgctgcaagaagaaatattttgattttgaccgggagatcctcccgtttacgagcgagaattgggactctttactactgggagagctctctgacacccctaaaggtgaacgatccagtaaacttctgtcggccttgaacagtcataaggacagattcatatctggccgggaaattaagaaaaggaagtgtctcttcggcttacatgcaaggatgcctccacctgttgaaccccctaccggcgatggcgcacttacgagctttccatcgggacaaggccccgggggcggtgtgtctcggccgctcggtaagcggaggagacccgagcccgaacccctccgacgaagacagaagggcaaagtggaggaactggggcctcctagtgcagtgcgcaaccagccggaaccacaggaacagcgggaaagagcacacctgcagcgtgccttacaggcctcggtgtcacctcctagtccgtccccaaaccaatcttatcagggatctagcggttacaattttcgacccacagacgccaggtgcctgccctcctcgcctatcagaatgttcgccagcttccatccctctgcatcgactgcaggaacaagtggagacagtgggccgcctgacaggtcccccctggagctccatatcgggtttcctaccgacatccccaaatctgctcctcattccatgacggcttcttcttcatccgtcagcagcccatctcctggcctgccacggcggtccgctcccccaagcccgctatgcagaagcctttcacccggcactggaggaggcgtgcgcggaggcgtaggctacctcagtagaggtgatcctgtgcgggtcttagcacgacgggtcagacccgatgggtctgtccagtatttggtagaatggggaggcgggggaattttttag

SEQ ID NO: 345667 - DNA, 2330 bp, Artificial Sequence
  derived and/or modified sequence
caccctcccccccaaccggtccgtccctcccctccctccctcccccccgccgcctcctcctcctgccgctgccgctgctttggctgctgcgtcatacgccccagagccgccgggacggaggggctgggcctggggaccccccggcctccgcctgcacgcccccccacgcccggacgtgccctctccgcgcgggggactcgcctaggtctcctacgtctgcccctgcccggctcccggcggccccagctgtcaccggcccccccaggatgcaatggcgcagcccccccggctgagccgctctggtgcctcctcactttgggacccagcttctcctgctcccacctctggccccaggcctcggctttgggagggtcaagatgtgctggccagatggactgatgggctgctatacttgggtaccatcaaaaaggtggacagtgctagggaggtgtgtctggtccagtttgaggatgattcgcagtttctggttctatggaaagacattagccctgctgccctccctggagaggaactcctctgttgtgtctgtcgctctgagactgtggtccctgggaaccggctggtcagctgtgagaagtgtcgccatgcttatcaccaggactgccatgttcccagggctccagcccctggagagggagagggcacatcctgggtatgccgccagtgtgtctttgcgatcgccaccaagaggggaggtgccctgaagaagggcccctatgcccgggccatgctgggtatgaagctttctctgccatatggactgaaggggctggactgggatgctggacatctgagcaaccgacagcagagttactgttactgtggtggccctggggagtggaacctgaaaatgctgcagtgccggagctgcctgcagtggttccatgaggcctgcacccagtgtctgagcaagcccctcctctatggggacaggttctatgaatttgaatgctgtgtgtgtcgcgggggccctgagaaagtccggagactacagcttcgctgggtggatgtggcccatcttgtcctgtatcacctcagtgtttgctgtaagaagaaatactttgattttgatcgtgagatcctccccttcacttctgagaattgggacagtttgctcctgggggagctttcagacacccccaaaggagaacgttcttccaagctcctctctgctcttaacagccacaaggaccgtttcatttcagggagagagattaagaagaggaaatgtttgtttggtctccatgctcggatgcctccccctgtggagccccctactggagatggagcactcaccagcttcccttcagggcagggccctgggggaggggtctcacgtcccctggggaagcgccggaggccggagccagagcccctgaggaggaggcagaaggggaaagtggaggagctggggccaccctcagcagtgcgcaatcagcccgagccccaggagcagagggagcgggctcatctgcagagggcactgcaggcctcagtgtctccaccatcccccagccctaaccagagttaccagggcagcagcggctacaacttccggcccacagatgcccgctgcctgcccagcagccccatccggatgtttgcttccttccacccttctgccagcaccgcagggacctctggggacagtggacccccagacaggtcacccctggaacttcacattggtttccccacagacatccctaaaagtgccccccactcgatgactgcctcatcttcctcagtttcatccccatccccaggtcttcctagacgctcagcacccccttctcccctgtgccgtagtttgtctcctgggactgggggaggagtccgaggtggggttggttacctgtcccgaggggaccctgtccgggtccttgctcggagagtacggcctgatggctctgtgcagtacctggttgagtggggaggagggggcatcttctgaacagcctgcctctgcccagctccccattcacacacaccggcactttcataccctgacctctgacctcacctacagctgggatgtacctggagagatagggggtagttctccctactgcccaggctggaatccaagagtggggagtggggaagaggccctcttctctaccctccttcatgattcctgacccctcccatccttcccatttcctttgatgttattttgttacagctttttaaatattttttaaaattatttaacccctgggggcagagactgaggagggaggatgataagggatcccggactctgtatgattgaaataaagagaaataaacaaatctagcagctctga

SEQ ID NO: 345668 - DNA, 1704 bp, Artificial Sequence
  derived and/or modified sequence
atggctcaaccgccacgcctgtcacgcagcggcgcttccagcttgtgggatccggctagtccggcacctaccagtggcccacggccacgcttgtgggaagggcaggacgtgctggctagatggacagatggcctcctgtacctcgggacaatcaagaaagtcgattccgcaagagaggtgtgcctggtgcagtttgaggacgacagccagttcctggtgctgtggaaggatatttcgccagctgccctcccaggcgaagaactcttgtgctgtgtgtgccgctccgagactgtcgtgcccggaaaccgattagtgagctgcgagaaatgcaggcacgcttatcatcaggattgtcatgtcccaagggccccagctcccggtgagggggaaggtacgagttgggtatgtagacagtgcgtctttgccattgcaactaagaggggaggggctctgaagaagggaccctatgcacgcgctatgttaggcatgaagctcagcctgccatatggcctaaagggcctggactgggacgcaggccacctctctaaccgtcagcagagttactgctactgtggcggtcccggtgaatggaatctgaagatgcttcagtgcagaagttgtctccaatggttccatgaggcttgcacccagtgtctcagcaagcccctactatacggggatcggttctacgaatttgagtgctgcgtgtgccgcggtggaccagaaaaagtcagacgccttcagttgcgttgggtggatgttgctcacctggttttgtatcatctgagcgtgtgctgcaagaaaaagtacttcgattttgatcgggaaatccttccgttcacatccgagaactgggattcactgctgctcggcgagctctcggatacccccaagggtgaaagaagtagcaagttattatctgccctaaatagtcataaagatcgcttcatttctggtcgggaaataaagaagagaaagtgcttatttgggctgcacgcacggatgcctccaccagtagagcctcctacaggcgacggcgctctgactagctttccatcagggcagggtccaggaggaggcgtgtcgcggccactcgggaagcggagacgccctgagcccgagccactcaggaggagacagaagggcaaagtcgaagaactggggcctccttctgccgtccgaaaccaaccagagccacaagagcagagagagagagcacacctccagcgtgccctccaagcctccgtgtctccaccctcaccatcacctaatcaaagctatcaggggagttccggatacaatttccgcccaaccgatgctcggtgcttacctagttcgccaattagaatgtttgcatcattccatcctagtgcttctactgctggcacgtctggagatagcggtcctcctgaccggtcccctctggaactgcacatagggttccctacagacattccaaagtccgcaccacatagcatgacagcctcttcatctagcgtgtcaagtccatcacctggcctgccacggaggagcgccccaccgagcccactatgtcgatccctctcacccggaacaggaggaggcgttcggggtggggtcggttatcttagtagaggggatcccgtgagagtcctggcgagaagagtgcgccctgatgggtccgtccagtatctggttgagtggggcggagggggtattttctag

SEQ ID NO: 345669 - DNA, 1704 bp, Artificial Sequence
  derived and/or modified sequence
atggcccagccccccagactgagcagaagcggcgccagcagcctgtgggaccccgccagccccgcccccaccagcggccccagacccagactgtgggagggccaggacgtgctggccagatggaccgacggcctgctgtacctgggcaccatcaagaaggtggacagcgccagagaggtgtgcctggtgcagttcgaggacgacagccagttcctggtgctgtggaaggacatcagccccgccgccctgcccggcgaggagctgctgtgctgcgtgtgcagaagcgagaccgtggtgcccggcaacagactggtgagctgcgagaagtgcagacacgcctaccaccaggactgccacgtgcccagagcccccgcccccggcgagggcgagggcaccagctgggtgtgcagacagtgcgtgttcgccatcgccaccaagagaggcggcgccctgaagaagggcccctacgccagagccatgctgggcatgaagctgagcctgccctacggcctgaagggcctggactgggacgccggccacctgagcaacagacagcagagctactgctactgcggcggccccggcgagtggaacctgaagatgctgcagtgcagaagctgcctgcagtggttccacgaggcctgcacccagtgcctgagcaagcccctgctgtacggcgacagattctacgagttcgagtgctgcgtgtgcagaggcggccccgagaaggtgagaagactgcagctgagatgggtggacgtggcccacctggtgctgtaccacctgagcgtgtgctgcaagaagaagtacttcgacttcgacagagagatcctgcccttcaccagcgagaactgggacagcctgctgctgggcgagctgagcgacacccccaagggcgagagaagcagcaagctgctgagcgccctgaacagccacaaggacagattcatcagcggcagagagatcaagaagagaaagtgcctgttcggcctgcacgccagaatgcccccccccgtggagccccccaccggcgacggcgccctgaccagcttccccagcggccagggccccggcggcggcgtgagcagacccctgggcaagagaagaagacccgagcccgagcccctgagaagaagacagaagggcaaggtggaggagctgggcccccccagcgccgtgagaaaccagcccgagccccaggagcagagagagagagcccacctgcagagagccctgcaggccagcgtgagcccccccagccccagccccaaccagagctaccagggcagcagcggctacaacttcagacccaccgacgccagatgcctgcccagcagccccatcagaatgttcgccagcttccaccccagcgccagcaccgccggcaccagcggcgacagcggcccccccgacagaagccccctggagctgcacatcggcttccccaccgacatccccaagagcgccccccacagcatgaccgccagcagcagcagcgtgagcagccccagccccggcctgcccagaagaagcgccccccccagccccctgtgcagaagcctgagccccggcaccggcggcggcgtgagaggcggcgtgggctacctgagcagaggcgaccccgtgagagtgctggccagaagagtgagacccgacggcagcgtgcagtacctggtggagtggggcggcggcggcatcttctag

SEQ ID NO: 345670 - protein, 243 aa, Artificial Sequence
  derived and/or modified sequence
  misc_feature (1)..(1): Xaa can be any naturally occurring amino acid
XSLLLTATRTVSFQGERLRRGNVCLVSMLGCLPLWSPLLEMEHSPGQGPGGGVSRPLGKRRRPEPEPLRRRQKGKVEELGPPSAVRNQPEPQEQRERAHLQRALQASVSPPSPSPNQSYQGSSGYNFRPTDARCLPSPIRMFASFHPSASTAGTSGDSGPPDRSPLELHIGFPTDIPKSAPHSMTASSSSVSSPSPGLPRRSAPPSPLCRSLSPGTGGGVRGGVGYLSRGDPVRVLARRVRPD

SEQ ID NO: 345671 - protein, 181 aa, Artificial Sequence
  derived and/or modified sequence
WGHPQQCAISPSPRSRGSGLICRGHCRPQCLHHPPALTRVTRAAAATTSGPQMPAACPGHPIRMFASFHPSASTAGTSGDSGPPDRSPLELHIGFPTDIPKSAPHSMTASSSSVSSPSPGLPRRSAPPSPLCRSLSPGTGGGVRGGVGYLSRGDPVRVLARRVRPDGSVQYLVEWGGGGIF

SEQ ID NO: 345672 - protein, 259 aa, Artificial Sequence
  derived and/or modified sequence
MVDFPGYNLSGAVASFLFILLTMKQSEDFRVIGPAHPILAGVGEDALLTCQLLPKRTTMHVEVRWYRSEPSTPVFVHRDGVEVTEMQMEEYRGWVEWIENGIAKGNVALKIHNIQPSDNGQYWCHFQDGNYCGETSLLLKVAGLGSAPSIHMEGPGESGVQLVCTARGWFPEPQVYWEDIRGEKLLAVSEHRIQDEDGLFYAEATLVVRNASAESVSCLVHNPVLTEEKGSVISLPEKLQTELGKYEVLAHTCGGSLCP

SEQ ID NO: 345673 - DNA, 780 bp, Artificial Sequence
  derived and/or modified sequence
atggtggattttccaggttataatctgtcaggcgcagtggcttcttttcttttcatcctcttgaccatgaagcaatccgaggattttagggtgatcggtcccgcccaccctatcctcgccggcgtaggagaagatgccctcctgacttgtcagctactccctaaacgcaccaccatgcatgtggaggtgcgctggtataggtccgagccatccactcccgtgtttgtgcacagagatggggtggaagtcacggagatgcagatggaggagtataggggctgggtggagtggatcgaaaatggtattgccaaaggtaatgttgcgttaaagattcacaacatacagccctccgataacgggcagtactggtgccatttccaggatggcaactattgcggcgaaacttcgctgctgcttaaagtcgccggattggggtccgccccgtccatccacatggaaggtcccggtgagtcaggggtgcagctggtgtgcaccgctcggggctggttccccgagccccaggtctactgggaggacatcagaggagaaaagctcttggctgtatcagaacatcgcatccaggacgaagacggtctgttctatgctgaggctactctggtggtccgcaacgcatcagccgaaagcgtgtcatgcttggtgcacaatccagttctcacggaggagaaggggagtgtgatctcattgcctgaaaagctgcagacagaacttggcaaatacgaagttttggcacatacctgcggggggagtctgtgtccctag

SEQ ID NO: 345674 - DNA, 780 bp, Artificial Sequence
  derived and/or modified sequence
atggtggacttccctggctacaacctatctggggcagtcgcttcctttctttttatcctgcttactatgaagcaatcggaggactttcgggtgatcggccctgcccaccccattttggccggcgtgggagaggacgctctactaacatgccaactcctcccaaagaggaccaccatgcatgttgaagtgcgttggtatcggagcgagccttctaccccagtgttcgtccatagggatggtgtggaagttacggaaatgcagatggaggaatatcgcggctgggttgagtggattgagaacgggattgccaaagggaacgtggccctgaaaattcacaacatccagccgtccgacaatgggcagtactggtgtcatttccaggacggtaattattgcggggagacctccctacttctcaaggtggcaggcctcggttctgcaccttcaattcacatggaaggaccaggggaatctggggtgcagctagtgtgcactgctcgaggatggtttcctgagcctcaagtgtattgggaggacatcagaggcgagaaacttctcgcagttagcgaacataggatccaggatgaagatggactgttctatgccgaggcaactttagttgttcggaacgcttcagccgagagcgtcagctgcctagtccataaccctgtgcttaccgaagagaaaggcagcgttatctcactgccagaaaaacttcagacagagcttggcaaatacgaagtactcgcccacacttgtggtgggtcactgtgtccctag

SEQ ID NO: 345675 - DNA, 780 bp, Artificial Sequence
  derived and/or modified sequence
atggtggatttccccggttataacctctctggggctgtggctagctttctgtttattcttctaaccatgaagcagtctgaagattttagagtcataggacccgcccatccaatcctggccggggttggagaggatgccctgctgacctgtcagctccttcctaaaaggacaacaatgcatgtggaggtgcgttggtacagaagcgagccctctactccagtcttcgtccaccgcgatggtgtagaggtgaccgagatgcagatggaggaatatcgagggtgggtagaatggatcgagaacggaattgccaaggggaatgtagccctgaagatccataacatacaacccagcgataacggacagtactggtgtcattttcaagacgggaactattgcggagagacgtccctgctgctgaaggttgcaggcttggggtccgcgccaagtatccatatggagggcccaggagagtctggcgtccagttagtctgtacagcccgaggctggttccccgaacctcaggtgtactgggaagacataagaggggagaaactgctggctgtcagtgagcatcgcatccaagatgaagatgggcttttctatgcggaagcaacgctcgttgtgagaaacgcctccgccgagtctgtgtcatgcctcgtacataatcctgtgttaaccgaagagaagggctctgttatttcccttccagagaagctccagactgaactggggaagtacgaagttctggctcacacctgtggggggtcactctgcccgtag

SEQ ID NO: 345676 - DNA, 780 bp, Artificial Sequence
  derived and/or modified sequence
atggtggacttccctggctacaacctgagcggggctgtggccagcttcctgttcatcctgctgaccatgaagcagagcgaggacttccgggtcatcggccctgcccaccccatcctggccggcgtgggggaggatgccctgctgacctgccagctgctgcccaagaggaccaccatgcacgtggaggtgcgctggtacagaagtgagcccagcacccctgtgtttgtgcacagagatggagtggaggtgacagagatgcagatggaggagtaccggggctgggtggagtggattgaaaatggcatcgccaagggaaatgtggccctgaagatccacaacatccagcccagcgacaatggccagtactggtgccacttccaggacggcaactactgtggggagaccagcctgctgctgaaggtggccggcctgggcagcgcccccagcatccacatggagggccctggagagagcggcgtgcagctggtgtgcacagcccggggctggttccctgagccccaggtgtactgggaggacatccggggggagaagctgctggccgtgtctgagcaccgcatccaggatgaagatggcctcttctacgccgaggccaccctggtggtgagaaatgccagcgctgagagcgtgtcctgcctggtgcacaaccctgtgctgacagaggagaagggcagcgtcatcagcctgcctgagaagctgcagacagagctgggcaagtatgaggtgctggcccacacctgtggcggcagcctgtgcccctag

SEQ ID NO: 345677 - DNA, 780 bp, Artificial Sequence
  derived and/or modified sequence
atggtggacttccccggctacaacctgagcggcgccgtggccagctttctctttatactgctcaccatgaagcagtcggaggatttcagagtgatcggaccagcccacccaattcttgcgggggtcggagaagacgccctccttacgtgtcagctgctcccaaaacgcactactatgcacgttgaagtccgctggtatagatcggagccttccacgcctgtgttcgtccatagggacggtgtcgaggtgactgaaatgcagatggaggagtatcgaggttgggtcgagtggatcgagaacggtattgcaaagggtaacgtagccctgaagatacataacatccaaccctcagataacggccagtactggtgtcacttccaggatgggaattactgtggggagacgtccctcctgcttaaggtagctgggctgggctccgccccatcaatacatatggaaggccccggtgaatcaggggtgcagttggtgtgtacggcacgaggctggttccccgaaccacaagtctactgggaggacatacgaggggagaagctcctcgcagtaagtgagcaccggatccaggacgaggacggactgttttatgcagaagcgactcttgtggtgagaaacgcttccgctgagagtgtttcctgcctggtgcacaatccagtgttaacagaagaaaaaggctcagtgatctccctgcccgaaaagctgcagaccgagctggggaaatacgaggttctagcacacacctgcgggggctcactatgtccttag

SEQ ID NO: 345678 - DNA, 780 bp, Artificial Sequence
  derived and/or modified sequence
atggtggacttccccggctacaacctgagcggcgccgtggccagcttcctattcatcctcttgacaatgaagcaatccgaggactttagggtaattggaccagcccacccaatcctagccggtgtaggcgaggatgcacttttgacgtgccaattactccccaaacggactaccatgcacgtcgaagtgagatggtatcggtccgagccctcaactcccgtgttcgtgcacagggacggtgtggaagtgaccgagatgcaaatggaagagtatcgagggtgggttgagtggatagagaacggcatcgccaaaggcaacgtggccttgaaaatccacaacatacagccatccgataacggacaatactggtgccattttcaagacgggaactactgcggcgaaacttctcttctgctaaaagtcgcaggcctcggctcagcgccttccatccacatggagggcccgggggagtcaggcgtacagctagtttgcacagccagagggtggtttcctgaaccacaggtctactgggaggatatccgtggagagaaacttctagcagtgtcggaacatagaatccaggacgaggacggactgttctatgcagaagcaacattggttgttagaaatgccagcgccgagtccgtctcttgccttgtccacaaccctgtgctgacagaagagaaaggtagcgtgattagcttacctgagaaactacaaaccgagctggggaagtacgaagtgctggcccacacctgtggggggtccttgtgtccctag

SEQ ID NO: 345679 - DNA, 780 bp, Artificial Sequence
  derived and/or modified sequence
atggtggacttccccggctacaacctgagcggcgccgtggccagcttcctattcattttactgacgatgaaacagagtgaggacttccgtgttatagggcctgcgcaccctattctggcaggggtgggggaagacgcgctgctgacatgtcagttgctgcccaaacgaactactatgcacgttgaggtacggtggtacagatccgagcccagtaccccagtctttgttcatcgcgacggtgtggaggtgaccgaaatgcagatggaagagtatagaggctgggtagaatggatcgagaacggcattgcaaagggcaacgtggctctaaagatccacaatattcagccctctgataacggccagtactggtgccacttccaggacggcaactattgcggggagactagcctgctcctcaaagttgccggacttggtagcgctcccagcatccatatggagggacccggcgagagtggagtgcagctggtgtgcacagcccgcggttggtttccagaaccccaagtctactgggaggatatccgtggggaaaagctcttggccgtgtcggagcacagaatccaagatgaagacggcctgttttacgcagaagccactcttgttgttagaaatgcctccgctgaatcggttagctgcctggtccataatccagtgctaactgaagaaaagggctcggtcatctctttacctgagaagctacagaccgagctgggtaaatacgaggtgttagctcatacttgtggaggctccttgtgcccatag

SEQ ID NO: 345680 - DNA, 780 bp, Artificial Sequence
  derived and/or modified sequence
atggttgactttccagggtataatctgtcaggtgcggtggcatcctttcttttcattttacttactatgaaacagtccgaggatttccgagtcatcggcccagctcacccaattctggcaggcgtgggggaggacgccctcttaacctgtcagcttctaccaaaacggacaaccatgcacgtcgaggttagatggtatcggagcgagccatctacacccgtctttgttcatagggacggagtggaagtaacagagatgcagatggaagagtaccggggatgggtggagtggatagagaacggcatcgccaagggcaacgttgctctaaagattcacaatatacagccatcggacaacgggcagtattggtgtcacttccaggacggcaactattgcggggagaccagcctcctgctgaaggtggctgggctaggtagcgcccctagtatccacatggagggacctggcgaaagcggggttcagctagtgtgtaccgccaggggttggtttccagagccacaagtgtactgggaggacatcaggggagaaaagctgctggcggttagcgagcacagaattcaggatgaggacggcctgttttatgcagaggctactctggtagtgaggaatgcctccgccgagagtgtttcttgtctggtccataaccccgtgctgaccgaggagaagggtagcgtgatttcactgcctgaaaaactgcagacagagctgggcaagtatgaagtcctagcccacacatgtggtggttccctttgcccctag

SEQ ID NO: 345681 - DNA, 780 bp, Artificial Sequence
  derived and/or modified sequence
atggtggactttcctggatacaatctgtcaggcgcagtggcttccttcctattcatccttctcactatgaagcagtctgaagacttccgcgtcatcggcccagcgcaccccatcctcgctggggtcggcgaagacgccttgttaacatgccagttgctacccaaaagaaccactatgcacgttgaggtccggtggtaccgctcagagccttcaacacccgtcttcgtgcaccgcgatggggtggaggtgacggagatgcagatggaagagtacagaggatgggtagaatggattgaaaatggcattgcaaaaggaaacgtggcgctgaagattcataacattcaacccagcgataatggacaatactggtgccattttcaagacggtaattactgtggggagacctctctcttgctcaaggtcgccggacttggctccgcgcctagtatccatatggagggtcctggagagtccggtgtgcagctggtgtgtactgccaggggctggtttcctgagccacaggtctactgggaagacatccggggtgagaagctcttagcagtgagcgaacatcgtatacaggacgaggatggtttattttacgccgaagcgactctggttgtacgcaatgcttcagctgagagcgtgtcttgtctggtgcataaccccgtgctgacggaggagaaaggatcagttatttctctccccgaaaaactacagactgaactcggaaaatacgaggtgctagctcatacctgcggcggaagtctgtgtccctag

SEQ ID NO: 345682 - DNA, 780 bp, Artificial Sequence
  derived and/or modified sequence
atggttgacttccccggttacaacctctcaggagcggttgcgtctttcttgtttatactgctaacaatgaaacagagcgaagatttcagggtgatagggcctgcccatcccatccttgccggagtaggagaggatgcactgctgacgtgccagctcctgccaaagagaaccaccatgcacgtagaggtgcggtggtaccgttctgagccctctactcctgtgttcgtccaccgggacggcgtggaagtgaccgagatgcagatggaagaataccggggatgggttgaatggattgagaatggcattgcaaaaggcaacgtggcattaaaaattcacaacatccagccttcagataacggacagtactggtgtcattttcaagacggcaattattgtggagaaacttctttgctgctgaaggtcgccggactgggatccgctcccagtatccatatggaaggcccaggagagagcggtgtccagcttgtctgcaccgcacggggatggtttccagaacctcaagtatactgggaggatattaggggcgagaagctgctggccgtgagcgagcacagaatccaggacgaggatggactgttctacgctgaagctaccttggttgtgcgcaatgcttctgccgagtcagtcagctgcctggttcacaatccggtgcttacggaggaaaagggctctgtcatctccctccccgaaaaactgcaaactgagctcggcaagtacgaggttctggctcatacctgcgggggatccctgtgcccatag

SEQ ID NO: 345683 - DNA, 784 bp, Artificial Sequence
  derived and/or modified sequence
agggaggatggtggattttccaggctacaatctgtctggtgcagtcgcctccttcctattcatcctgctgacaatgaagcagtcagaagactttagagtcattggccctgctcatcctatcctggccggggttggggaagatgccctgttaacctgccagctactccccaagaggaccacaatgcacgtggaggtgaggtggtaccgctcagagcccagcacacctgtgtttgtgcacagggatggagtggaggtgactgagatgcagatggaggagtacagaggctgggtagagtggatagagaatggcattgcaaagggaaatgtggcactgaagatacacaacatccagccctccgacaatggacaatactggtgccatttccaggatgggaactactgtggagaaacaagcttgctgctcaaagtagcaggtctggggtctgcccctagcatccacatggagggacctggggagagtggagtccagcttgtgtgcactgcaaggggctggttcccagagccccaggtgtattgggaagacatccggggagagaagctgctggccgtgtctgagcatcgcatccaagatgaagatggcctgttctatgcggaagccaccctggtggtcaggaacgcctctgcagagtctgtgtcctgcttggtccacaaccccgtcctcactgaggagaaggggtcggtcatcagcctcccagagaaactccagactgagctgggtaagtacgaggtgctggcacacacctgtggagggagcctctgccct

SEQ ID NO: 345684 - DNA, 780 bp, Artificial Sequence
  derived and/or modified sequence
atggtggacttccccggctacaacctgagcggcgccgtggccagcttcctgttcatcctgctgaccatgaagcagagcgaggacttcagagtgatcggccccgcccaccccatcctggccggcgtgggcgaggacgccctgctgacctgccagctgctgcccaagagaaccaccatgcacgtggaggtgagatggtacagaagcgagcccagcacccccgtgttcgtgcacagagacggcgtggaggtgaccgagatgcagatggaggagtacagaggctgggtggagtggatcgagaacggcatcgccaagggcaacgtggccctgaagatccacaacatccagcccagcgacaacggccagtactggtgccacttccaggacggcaactactgcggcgagaccagcctgctgctgaaggtggccggcctgggcagcgcccccagcatccacatggagggccccggcgagagcggcgtgcagctggtgtgcaccgccagaggctggttccccgagccccaggtgtactgggaggacatcagaggcgagaagctgctggccgtgagcgagcacagaatccaggacgaggacggcctgttctacgccgaggccaccctggtggtgagaaacgccagcgccgagagcgtgagctgcctggtgcacaaccccgtgctgaccgaggagaagggcagcgtgatcagcctgcccgagaagctgcagaccgagctgggcaagtacgaggtgctggcccacacctgcggcggcagcctgtgcccctag

SEQ ID NO: 345685 - protein, 321 aa, Artificial Sequence
  derived and/or modified sequence
MERKNQTAITEFIILGFSNLNELQFLLFTIFFLTYFCTLGGNILMILTTVTDPHLHTPMYYFLGNLAFIDICYTTSNVPQMMVHLLSKKKSISYVGCVVQLFAFVFFVGSECLLLAAMAYDRYIAICNPLRYSVILSKVLCNQLAASCWAAGFLNSVVHTVLTFCLPFCGNNQINYFFCDIPPLLILSCGNTSVNELALLSTGVFIGWTPFLCIVLSYICIISTILRIQSSEGRRKAFSTCASHLAIVFLFYGSAIFTYVRPISTYSLKKDRLVSVLYSVVTPMLNPIIYTLRNKDIKEAVKTIGSKWQPPISSLDSKLTY

SEQ ID NO: 345686 - DNA, 966 bp, Artificial Sequence
  derived and/or modified sequence
atggagagaaagaaccagaccgccatcaccgagttcatcatcctgggcttcagcaacctgaacgagctgcagttcctgctgttcaccatcttcttcctgacctacttctgcaccctgggcggcaacatcctgatgatcctgaccaccgtgaccgacccccacctgcacacccccatgtactacttcctgggcaacctggccttcatcgacatctgctacaccaccagcaacgtgccccagatgatggtgcacctgctgagcaagaagaagagcatcagctacgtgggctgcgtggtgcagctgttcgccttcgtgttcttcgtgggcagcgagtgcctgctgctggccgccatggcctacgacagatacatcgccatctgcaaccccctgagatacagcgtgatcctgagcaaggtgctgtgcaaccagctggccgccagctgctgggccgccggcttcctgaacagcgtggtgcacaccgtgctgaccttctgcctgcccttctgcggcaacaaccagatcaactacttcttctgcgacatcccccccctgctgatcctgagctgcggcaacaccagcgtgaacgagctggccctgctgagcaccggcgtgttcatcggctggacccccttcctgtgcatcgtgctgagctacatctgcatcatcagcaccatcctgagaatccagagcagcgagggcagaagaaaggccttcagcacctgcgccagccacctggccatcgtgttcctgttctacggcagcgccatcttcacctacgtgagacccatcagcacctacagcctgaagaaggacagactggtgagcgtgctgtacagcgtggtgacccccatgctgaaccccatcatctacaccctgagaaacaaggacatcaaggaggccgtgaagaccatcggcagcaagtggcagccccccatcagcagcctggacagcaagctgacctactag

SEQ ID NO: 345687 - DNA, 966 bp, Artificial Sequence
  derived and/or modified sequence
atggaacgaaaaaaccaaaccgctatcaccgagtttattatcctgggcttctcaaatctcaacgagctgcagttcctactgttcaccatctttttcctgacctatttctgtacactgggggggaacatcctcatgattctgactaccgtgaccgaccctcacttacacaccccaatgtattacttcctcggcaacctggcttttattgacatatgttacacaaccagcaacgtgccccagatgatggtacacctgctgagtaagaagaagtccattagctatgtgggctgcgtggtccaactgttcgccttcgtgttttttgtgggcagcgaatgcctgctgttggccgctatggcgtatgacagatatattgctatctgcaacccgctacgatacagcgtcatcctttcaaaagttctctgtaaccaactcgccgcctcctgttgggccgccggattcctcaattctgtggtgcacaccgtgctgaccttctgtttaccattctgtggtaacaatcagatcaactactttttctgcgatatcccccccctcctgatcctgtcttgcggaaacacatcagttaatgagcttgccctactgtctactggcgtatttatcggctggaccccattcctgtgcatcgtgctgtcctacatctgtataatctcaactattctccggattcagtcgtccgagggccgccgtaaggcgttttctacttgtgcgtctcacttggctatcgtcttcctgttttacggctccgcaatctttacgtacgtgagacctatcagcacatattctcttaagaaggatagattggtcagcgtgctgtacagtgtggtaacccccatgctgaatccaattatttatactttgaggaataaggatataaaagaggctgttaaaactattggctctaagtggcaaccacctatcagctctctggattctaaactgacgtattag

SEQ ID NO: 345688 - DNA, 966 bp, Artificial Sequence
  derived and/or modified sequence
atggaacggaagaatcagacagctattaccgagttcattattctgggctttagcaatctgaacgagcttcagtttctcttgttcaccattttcttcctcacctacttttgcaccctgggtggtaatattctgatgatcctcacaactgtcacagatcctcatctgcacactcctatgtactacttcttggggaacctggcctttatcgacatctgttacactacgtcgaatgtgccgcagatgatggttcacctgctttccaaaaagaagtccatctcttatgttgggtgcgtggtccaactgttcgcatttgtatttttcgtggggtccgagtgcctcttgctggctgccatggcgtacgaccgctacatagccatctgcaatcccctccggtactctgttattctgagtaaagtgctgtgtaatcaattggccgcttcttgttgggctgccggctttttgaactctgtagttcatactgtcctcacattttgtctcccattctgcggaaacaaccagatcaattactttttctgcgatattccccctctcctgatcctgtcttgcggtaataccagcgtcaacgaactggctctgctgtccacaggggtttttatcggctggaccccattcctctgtattgttctctcctacatctgtatcatcagcacaatcctgcgaattcagtcttccgaaggtcggcgcaaagctttttccacatgtgcatcacatctggcgattgtctttcttttttatggatccgccatattcacctatgtgcggcctatctctacatacagtctgaaaaaagatcgcctggtgtcggttttgtacagtgtcgtaacacctatgctaaatccaattatctacaccctgaggaacaaagatatcaaggaggccgtcaaaactatcggctcaaaatggcaaccaccgatttcatctctcgatagtaaactgacatactag

SEQ ID NO: 345689 - DNA, 966 bp, Artificial Sequence
  derived and/or modified sequence
atggaacgcaagaaccaaactgcaattacagaattcatcatccttggtttctcaaacttaaatgagctgcaatttttactgttcaccattttctttctaacttacttctgtaccttgggaggcaacattctgatgatactgacaaccgtgacagaccctcatctgcacaccccgatgtattacttccttggcaatcttgcctttatagacatatgttacacaacatctaatgtgccccagatgatggtccacttgctctctaagaagaaatcaatctcctatgttggctgcgttgtgcaactgttcgcatttgtgtttttcgtaggatctgaatgtctccttctggctgctatggcttatgatcgatatatagccatttgcaaccccctccggtactccgtaattctctccaaagttctttgcaatcagcttgcggctagctgctgggcagccggtttcctgaactctgttgttcatacagtactgaccttttgtcttcccttctgtggtaataatcaaattaactactttttctgtgatatcccaccgctactgattctctcatgtgggaacacaagcgtgaacgaattggccctgctgtctactggtgtgttcatcggatggaccccgttcctctgtattgtgctatcctatatctgcataatcagcaccatcctgagaattcagtcatctgaaggccgccgcaaagcgttcagtacctgcgcttcacacttagcgattgtgttcttgttttacgggtcagccatcttcacatatgtccgccccatctcaacctattctctaaaaaaggaccgtttggtctcagtgctctactctgtggtaacacccatgctgaaccccattatttataccctcaggaataaagatattaaggaagccgtaaagactatcggttcaaagtggcaaccacccattagctcgcttgatagcaagctgacatattag

SEQ ID NO: 345690 - DNA, 966 bp, Artificial Sequence
  derived and/or modified sequence
atggagaggaagaaccagacagccatcacagagttcatcatcctgggcttcagcaacctgaatgagctgcagttcctgctcttcaccatcttcttcctgacctacttctgcaccctgggcggcaacatcctgatgatcctgaccaccgtgacagacccccacctgcacacccccatgtactacttcctgggcaacctggccttcatcgacatctgctacaccaccagcaatgtgccccagatgatggtgcacctgctgagcaagaagaagagcatctcctatgtgggctgtgtggtgcagctgtttgcctttgtgttctttgtgggctctgaatgtctgctgctggccgccatggcctatgaccgctacatcgccatctgcaaccccctgcgctacagcgtcatcctgagcaaggtgctgtgcaaccagctggccgccagctgctgggccgccggcttcctgaacagcgtggtgcacacagtgctgaccttctgcctgcccttctgtggcaacaaccagatcaactacttcttctgtgacatcccccccctgctgatcctgagctgtggcaacacctctgtgaatgagctggccctgctgagcactggagtcttcatcggctggacccccttcctgtgcatcgtgctgagctacatctgcatcatcagcaccatcctgcgcatccagagcagcgagggccgcaggaaggccttcagcacctgtgccagccacctggccatcgtgttcctgttctacggcagcgccatcttcacctacgtgcggcccatcagcacctacagcctgaagaaggaccggctggtgtctgtgctgtacagcgtggtgacccccatgctgaaccccatcatctacaccctgaggaacaaggacatcaaggaggccgtgaagaccatcggcagcaagtggcagccccccatcagcagcctggacagcaagctgacctactag

SEQ ID NO: 345691 - DNA, 966 bp, Artificial Sequence
  derived and/or modified sequence
atggagcggaagaaccagaccgccatcaccgagttcatcatcctggggttctctaatctgaatgaactgcaatttctgctcttcaccatatttttcctgacatatttctgtacactgggcggaaacatactgatgatcctaacgaccgtgacagacccacacctgcacacgcctatgtactactttcttggcaacctcgcatttatcgacatttgttacacaacctctaacgtgcctcagatgatggtgcatttattgagcaaaaagaagtccatctcttatgtcggatgcgtagtccagctgtttgctttcgtgtttttcgtgggcagtgaatgcttgctcttggccgcgatggcgtatgatcgttacatagccatttgtaacccactgaggtattcggtcatcctttcaaaagtgctgtgcaatcagttggccgcttcatgttgggccgcaggcttcttgaatagcgtggtccataccgtgctgactttctgtctacctttttgcggcaataaccagattaattactttttctgtgatattccccctctgttgatcttaagttgcggaaacacctcagtcaatgagttagctctacttagtactggtgtgtttattggctggaccccctttttatgcatcgttctttcttacatctgcattatttccactatattgagaatccaaagctccgagggtagaagaaaggccttctccacatgcgcgagccatctggccatcgttttcctcttctacggaagtgccattttcacttacgtcaggccaatttccacttactccttgaaaaaagatcggctcgtgtccgtgttgtactccgtggtcactccaatgctaaatcctatcatttatactctgagaaataaagatattaaggaagctgtcaaaactatcggctccaaatggcagcctccaattagctcgttagatagcaagctgacatactag

SEQ ID NO: 345692 - DNA, 966 bp, Artificial Sequence
  derived and/or modified sequence
atggagcggaagaaccagaccgccatcaccgagttcatcatcctggggtttagcaatctgaatgagctccaattcctgctgtttaccatctttttcctgacttatttttgcactctggggggaaacatcctgatgatcctcacgaccgtcactgatccccatttgcacactccaatgtactatttcctcggcaatctagcattcatcgacatttgttataccacttcaaacgtgccacagatgatggtgcatctgctgtcaaagaagaagtcgatctcttacgtggggtgcgtggtccagctgttcgctttcgttttctttgtgggctccgagtgcctgctgctagccgcaatggcctacgatagatatattgccatctgcaatccactgagatacagcgtgattttgagcaaagtcctttgtaatcagctggccgctagctgttgggcagcaggtttccttaacagtgttgttcacaccgtcctgaccttctgcctgcccttctgtggcaacaatcaaatcaactatttcttttgcgatatccctccgcttctaattctctcttgtggcaacacctctgtcaatgaactggcactcctcagcaccggcgtcttcatcggttggacccctttcctatgtattgtgctttcatacatttgcattatctctaccattctccgcatccagtcgtctgagggcagacggaaagccttctcaacttgcgcttcccacttggccattgtgtttcttttctatgggagcgccattttcacctacgtccgtcccatcagcacctattctctaaaaaaggaccgcctggtgtcagtcctgtattcggttgtgacacctatgttgaacccgataatctatactttgagaaataaggacatcaaggaggctgttaagaccattggtagcaaatggcagccgcctatcagcagccttgatagcaagctcacatattag

SEQ ID NO: 345693 - DNA, 966 bp, Artificial Sequence
  derived and/or modified sequence
atggagcggaagaaccagaccgccatcaccgagttcatcatcctggggtttagtaacctcaacgagctgcagtttctactgtttactatcttttttctgacctacttttgtactctgggcggcaatatactgatgatcctgaccacagtcaccgaccctcacctgcacactcccatgtactactttctggggaacctggccttcattgatatatgctataccacttctaatgtgccacagatgatggtgcacttgctctccaagaaaaaatcaatatcctatgtaggttgcgtggtgcagttgtttgcttttgtcttttttgtgggaagcgagtgcctactcttagctgccatggcttacgatcgctacattgccatttgcaaccccctgcgatacagcgtaattctttctaaagttctttgtaaccagttagctgcgagctgctgggcagctggttttttgaatagcgtggtacatactgttctgaccttttgtctgccattctgtggtaataatcagattaattattttttctgtgacatccccccactgctgattctgagctgcggcaacacctctgtgaacgagcttgcattgctctccaccggcgtgttcatcggctggactccattcttatgtattgtactgagttacatttgcataatttctactatcctcagaattcaaagctccgaaggacggaggaaagccttcagcacctgcgcttcccacctggctatcgtgttcctcttttacgggtccgccatcttcacttatgtgcgcccaatcagcacttattcccttaagaaggacagactcgtaagcgtactgtactcagtcgtgaccccgatgcttaatcctatcatctataccttgcggaataaggacatcaaggaagctgttaaaaccatcggcagcaagtggcagcccccgatcagctccctggatagcaagctcacctactag

SEQ ID NO: 345694 - DNA, 1117 bp, Artificial Sequence
  derived and/or modified sequence
gaaatacgttgtgaacttcccagcacatctgttagaaaggaggtccagaaaaagagcacaaagagaatggtcatgctattgcagcatatgattcatttttataatctggtcttctctttgcccaattcctgaaaggaaaccaggcgacatcatggaaagaaagaatcaaacagctataactgaattcatcatcttgggattctccaacctaaatgaattgcagtttttactattcaccatcttctttctgacttatttctgtactttgggaggaaatatattaatgatcttgacgactgtgactgatccacacctgcatacacctatgtattattttctagggaacttggcctttattgacatctgctacaccaccagcaatgtcccccagatgatggtgcacctcctctcaaagaaaaaaagcatttcttatgtggggtgtgtggttcaactttttgcatttgttttctttgtaggatcagagtgtctcctactggcagcaatggcatatgatcgttacattgcaatctgcaatcctttaaggtattcagttattctgagcaaggttctatgcaatcaattagcagcctcatgctgggctgctggtttccttaactcagtggtgcatacagtgttgacattctgcctgcccttctgtggcaacaatcagattaattacttcttctgtgacatcccccctttgctgatcttgtcttgtggaaacacttctgtcaatgagttggcactgctatccactggggtcttcattggttggactcctttcctttgtatcgtactttcctacatttgcataatctccaccatcttgaggatccagtcctcagagggaagacgaaaagccttttctacatgtgcctcccacctggccattgtctttctcttttatggcagcgccatctttacatatgtacggcccatctcaacttactcattaaagaaagataggttggtttcagtgttgtacagtgttgttacccccatgctaaaccctataatttacacattgaggaataaggacatcaaagaggctgtcaaaactatagggagcaagtggcagccaccaatttcctctttggatagtaaactcacttattga

SEQ ID NO: 345695 - DNA, 1266 bp, Artificial Sequence
  derived and/or modified sequence
gagctgaaggtaggaaattccaacattctgaagtcttcagcaaatcttagcagatcatctcctcctcacagtcctgtctttagagaacagggtcgatatttcggcttctgcgaactcagatgtcatcttttcttccctaaagtttttaaagttcctattgatatattcccctgcctagagggtttggtggtcgttttcttcctcttaactttattaaggtcatgctattgcagcatatgattcatttttataatctggtcttctctttgcccaattcctgaaaggaaaccaggcgacatcatggaaagaaagaatcaaacagctataactgaattcatcatcttgggattctccaacctaaatgaattgcagtttttactattcaccatcttctttctgacttatttctgtactttgggaggaaatatattaatgatcttgacgactgtgactgatccacacctgcatacacctatgtattattttctagggaacttggcctttattgacatctgctacaccaccagcaatgtcccccagatgatggtgcacctcctctcaaagaaaaaaagcatttcttatgtggggtgtgtggttcaactttttgcatttgttttctttgtaggatcagagtgtctcctactggcagcaatggcatatgatcgttacattgcaatctgcaatcctttaaggtattcagttattctgagcaaggttctatgcaatcaattagcagcctcatgctgggctgctggtttccttaactcagtggtgcatacagtgttgacattctgcctgcccttctgtggcaacaatcagattaattacttcttctgtgacatcccccctttgctgatcttgtcttgtggaaacacttctgtcaatgagttggcactgctatccactggggtcttcattggttggactcctttcctttgtatcgtactttcctacatttgcataatctccaccatcttgaggatccagtcctcagagggaagacgaaaagccttttctacatgtgcctcccacctggccattgtctttctcttttatggcagcgccatctttacatatgtacggcccatctcaacttactcattaaagaaagataggttggtttcagtgttgtacagtgttgttacccccatgctaaaccctataatttacacattgaggaataaggacatcaaagaggctgtcaaaactatagggagcaagtggcagccaccaatttcctctttggatagtaaactcacttattga

SEQ ID NO: 345696 - DNA, 1048 bp, Artificial Sequence
  derived and/or modified sequence
gtcatgctattgcagcatatgattcatttttataatctggtcttctctttgcccaattcctgaaaggaaaccaggcgacatcatggaaagaaagaatcaaacagctataactgaattcatcatcttgggattctccaacctaaatgaattgcagtttttactattcaccatcttctttctgacttatttctgtactttgggaggaaatatattaatgatcttgacgactgtgactgatccacacctgcatacacctatgtattattttctagggaacttggcctttattgacatctgctacaccaccagcaatgtcccccagatgatggtgcacctcctctcaaagaaaaaaagcatttcttatgtggggtgtgtggttcaactttttgcatttgttttctttgtaggatcagagtgtctcctactggcagcaatggcatatgatcgttacattgcaatctgcaatcctttaaggtattcagttattctgagcaaggttctatgcaatcaattagcagcctcatgctgggctgctggtttccttaactcagtggtgcatacagtgttgacattctgcctgcccttctgtggcaacaatcagattaattacttcttctgtgacatcccccctttgctgatcttgtcttgtggaaacacttctgtcaatgagttggcactgctatccactggggtcttcattggttggactcctttcctttgtatcgtactttcctacatttgcataatctccaccatcttgaggatccagtcctcagagggaagacgaaaagccttttctacatgtgcctcccacctggccattgtctttctcttttatggcagcgccatctttacatatgtacggcccatctcaacttactcattaaagaaagataggttggtttcagtgttgtacagtgttgttacccccatgctaaaccctataatttacacattgaggaataaggacatcaaagaggctgtcaaaactatagggagcaagtggcagccaccaatttcctctttggatagtaaactcacttattga

SEQ ID NO: 345697 - DNA, 966 bp, Artificial Sequence
  derived and/or modified sequence
atggaacggaagaaccagactgccatcacggaatttatcatattgggatttagcaacttgaatgaactccagtttctgctcttcacaatcttctttctcacctacttctgcacactgggaggcaacatattgatgatcctgacaacagtcaccgatccgcacttgcatacacccatgtactactttctgggcaacctggcctttatcgacatctgttacacaaccagcaacgtcccccaaatgatggtacatcttctgtccaaaaagaagagcattagctacgttggatgcgtcgtacagctgtttgcctttgtcttcttcgtagggtccgagtgcttattgcttgccgctatggcatacgaccggtatattgccatctgtaatccgcttaggtactccgtgattctttcaaaagtgctctgcaatcaactcgccgcttcttgctgggctgccggtttcctgaattccgtggttcacactgtattgaccttttgcctgccgttctgtggcaacaatcagatcaactatttcttttgtgatatcccaccgcttcttattctgtcttgcgggaatacgtctgtcaacgagttggctctgctgagcacaggcgtctttatcgggtggactccttttttgtgtatagtactgagctacatctgcatcatttcaactattctgcggattcagtcctctgaagggcgtcggaaggcttttagcacgtgtgctagccatctcgccattgtgttcttgttttatgggagcgcaatatttacctacgttaggcccatttccacctactccctgaagaaggatagactggtctcagtgttatactctgtggtgacccccatgctgaatcccattatctacaccttgcggaataaagacataaaggaagctgtcaagaccatagggtctaagtggcagccacccatctcatcgctggactctaaattgacgtattag

SEQ ID NO: 345698 - DNA, 966 bp, Artificial Sequence
  derived and/or modified sequence
atggaaagaaagaatcagacggccattaccgagttcataattctggggtttagtaacctgaacgagttgcagtttctgctcttcactattttttttctgacctacttctgcacgctgggaggcaatatactgatgatcctgacaaccgtaacagaccctcatctccacacaccaatgtactactttctcgggaacctggctttcattgatatatgctataccacttctaacgttcctcagatgatggtccacctcctctctaaaaaaaaaagcatctcatatgttggatgcgtagtccagctgttcgcctttgttttctttgtcggttccgaatgcctgctattggcggctatggcatacgatcgttatatcgctatttgtaacccgctccgctactcagttatcttaagcaaggtcctctgtaaccagttggccgcatcttgttgggccgcaggattcctcaattcagtggtccacactgtcctgacgttctgtctccctttctgcgggaacaatcagattaattattttttctgtgacattccaccacttctgattctgagttgtggcaatacgagtgttaacgagttagccctcctcagcacaggagtgttcattggctggactccttttttatgtatagtactctcatatatttgcataatcagcactatcctcaggatccaatcttcggagggtcgcaggaaggccttctcaacgtgcgcgtctcacctggcaatcgtgtttctgttctacggcagcgcaatttttacctacgtgcgtcctatctctacttactctctgaaaaaggatagattggtttcagtcctctactcagtggtaaccccaatgctaaaccctatcatttacacgttgcggaataaggacattaaagaggctgttaaaaccatcggttctaagtggcaacctcccatatctagccttgacagtaagttgacctattag

SEQ ID NO: 345699 - DNA, 966 bp, Artificial Sequence
  derived and/or modified sequence
atggagaggaaaaaccagactgcaattactgagttcattatcctggggttcagcaatcttaacgagcttcaattcctcctatttacaatcttctttctgacctatttttgtacacttggaggaaatattctgatgatactcacgaccgtcaccgaccctcacttacacactccaatgtactattttctaggtaatctggccttcatcgatatctgttacaccacctccaacgtaccacagatgatggtgcaccttctctctaaaaaaaagagcatcagctacgtggggtgtgttgttcagctgtttgcctttgtcttcttcgtgggctcagagtgtttactgttggccgctatggcatatgatcgttatattgcaatttgtaatccacttagatattcagtgatactctcaaaagttctttgcaaccagctggccgcatcatgctgggcagccggtttcttaaactcagtggtgcacaccgtcctcaccttttgcctgccgttttgtgggaataatcaaattaattactttttttgcgatatccctcctctgttgatactctcatgcggcaatacctcagttaatgagctggccctgttgagcaccggagtcttcatcggttggacccctttcctttgcatagtgctgtcatatatctgcatcatctctactatcttgaggatacagtcaagcgagggacgtaggaaggcattctctacctgtgcctctcatcttgctatcgtgttcctgttctatggatctgccattttcacatacgtacgcccaatctcgacctactcactgaaaaaagacagattggtgtctgttctctattctgtggtgacacccatgttgaatcctattatttatacattacgaaacaaagacatcaaagaggcggtcaagaccatcggctccaaatggcagccacctattagttctcttgactcgaagctcacctactag

SEQ ID NO: 345700 - protein, 1802 aa, Artificial Sequence
  derived and/or modified sequence
MEDTQAIDWDVEEEEETEQSSESLRCNVEPVGRLHIFSGAHGPEKDFPLHLGKNVVGRMPDCSVALPFPSISKQHAEIEILAWDKAPILRDCGSLNGTQILRPPKVLSPGVSHRLRDQELILFADLLCQYHRLDVSLPFVSRGPLTVEETPRVQGETQPQRLLLAEDSEEEVDFLSERRMVKKSRTTSSSVIVPESDEEGHSPVLGGLGPPFAFNLNSDTDVEEGQQPATEEASSAARRGATVEAKQSEAEVVTEIQLEKDQPLVKERDNDTKVKRGAGNGVVPAGVILERSQPPGEDSDTDVDDDSRPPGRPAEVHLERAQPFGFIDSDTDAEEERIPATPVVIPMKKRKIFHGVGTRGPGAPGLAHLQESQAGSDTDVEEGKAPQAVPLEKSQASMVINSDTDDEEEVSAALTLAHLKESQPAIWNRDAEEDMPQRVVLLQRSQTTTERDSDTDVEEEELPVENREAVLKDHTKIRALVRAHSEKDQPPFGDSDDSVEADKSSPGIHLERSQASTTVDINTQVEKEVPPGSAIIHIKKHQVSVEGTNQTDVKAVGGPAKLLVVSLEEAWPLHGDCETDAEEGTSLTASVVADVRKSQLPAEGDAGAEWAAAVLKQERAHEVGAQGGPPVAQVEQDLPISRENLTDLVVDTDTLGESTQPQREGAQVPTGREREQHVGGTKDSEDNYGDSEDLDLQATQCFLENQGLEAVQSMEDEPTQAFMLTPPQELGPSHCSFQTTGTLDEPWEVLATQPFCLRESEDSETQPFDTHLEAYGPCLSPPRAIPGDQHPESPVHTEPMGIQGRGRQTVDKVMGIPKETAERVGPERGPLERETEKLLPERQTDVTGEEELTKGKQDREQKQLLARDTQRQESDKNGESASPERDRESLKVEIETSEEIQEKQVQKQTLPSKAFEREVERPVANRECDPAELEEKVPKVILERDTQRGEPEGGSQDQKGQASSPTPEPGVGAGDLPGPTSAPVPSGSQSGGRGSPVSPRRHQKGLLNCKMPPAEKASRIRAAEKVSRGDQESPDACLPPTVPEAPAPPQKPLNSQSQKHLAPPPLLSPLLPSIKPTVRKTRQDGSQEAPEAPLSSELEPFHPKPKIRTRKSSRMTPFPATSAAPKLEPSTSTDQPVTPEPTSQATRGRTNRSSVKTPETVVPTAPELQPSTSTDQPVTPEPTSQATRGRTDRSSVKTPETVVPTAPELQASASTDQPVTSEPTSRTTRGRKNRSSVKTPETVVPAAPALQPSTSTDQPVTPEPTSRATRGRTNRSSVKTPESIVPIAPELQPSTSRNQLVTPEPTSRATRCRTNRSSVKTPEPVVPTAPEPHPTTSTDQPVTPKLTSRATRRKTNRSSVKTPKPVEPAASDLEPFTPTDQSVTPEAIAQGGQSKTLRSSTVRAMPVPTTPEFQSPVTTDQPISPEPITQPSCIKRQRAAGNPGSLAAPIDHKPCSAPLEPKSQASRNQRWGAVRAAESLTAIPEPASPQLLETPIHASQIQKVEPAGRSRFTPELQPKASQSRKRSLATMDSPPHQKQPQRGEVSQKTVIIKEEEEDTAEKPGKEEDVVTPKPGKRKRDQAEEEPNRIPSRSLRRTKLNQESTAPKVLFTGVVDARGERAVLALGGSLAGSAAEASHLVTDRIRRTVKFLCALGRGIPILSLDWLHQSRKAGFFLPPDEYVVTDPEQEKNFGFSLQDALSRARERRLLEGYEIYVTPGVQPPPPQMGEIISCCGGTYLPSMPRSYKPQRVVITCPQDFPHCSIPLRVGLPLLSPEFLLTGVLKQEAKPEAFVLSPLEMSST

SEQ ID NO: 345701 - DNA, 5409 bp, Artificial Sequence
  derived and/or modified sequence
atggaagatacccaggctattgactgggacgtggaggaggaggaggagactgaacagtctagcgagagcttacgttgcaacgtggagcctgtgggaaggctgcacatcttcagcggggcccatggtcctgaaaaagacttcccccttcacctcggtaagaatgtggtgggcagaatgccagactgctccgtggctctgcctttcccaagcatctcaaaacagcacgcagaaatcgagatactggcctgggataaagctcccatcctgagggattgtggctctctgaacgggacccagatcctgcggccgcccaaagtactgagcccaggggtgtcacaccggctgcgcgaccaggagctgattctgttcgccgatttgctgtgtcaatatcatagactagatgtcagcctgccatttgtctctcggggcccgctgaccgtcgaggagacaccccgtgttcagggagaaactcagccccagcggctgcttcttgctgaagactccgaggaagaagtcgatttcctgtctgagcgaaggatggttaagaaaagccggaccacgtcctcatccgtcatcgtgcccgaaagcgacgaagagggacatagtcccgttttggggggactaggaccgcctttcgcctttaacctaaactcggacacggatgttgaagagggccagcaacccgcaaccgaagaggccagcagcgcggcccgccggggcgccaccgtcgaagccaaacagtccgaggccgaggtagtgacagaaattcagttggaaaaggaccagcctttagtcaaggaacgcgataatgacaccaaggtgaagcgaggtgccggcaacggcgttgtcccagccggagtgatactcgagcgtagccaaccgcctggtgaggacagcgatactgatgttgatgacgattccagacccccagggagaccagctgaagtccatcttgagcgcgctcagccctttggctttatcgacagtgatacggatgctgaggaggagcgcatccccgccacccctgtagttatccctatgaaaaaacgtaagatcttccatggtgtcggaacacgggggccaggcgctccagggttagctcacttacaggaaagtcaagccggaagtgataccgacgtcgaagagggaaaagctcctcaggccgtgcccctggagaagtcccaggcaagcatggttataaacagtgacactgacgatgaagaggaggtgtccgctgccctaaccctggcccacctaaaggaatcccagccagccatctggaatagagatgctgaagaagatatgccgcaaagagtggtgctgctgcagaggagtcagactactactgaacgcgactcggataccgacgtggaagaagaagaattaccagtggagaatagggaagcagtacttaaagaccatactaagatccgagccctagtgcgcgctcactcagaaaaagaccagcctccattcggagattcggatgattctgtggaggccgacaaatcctctccaggcatccacctcgaacggagccaggcatctacgaccgttgacattaacacacaggtcgaaaaagaggttcctccaggttccgctataatccatatcaaaaagcaccaggtcagcgtcgaggggactaaccagactgatgttaaggcagtgggagggccagccaaattactggtggtcagtttggaggaggcctggccattacacggggactgtgagacagacgccgaggaaggcacaagcttgactgcctctgtcgttgcagacgtgaggaaatcacagctgccagcagagggcgatgctggtgccgagtgggcggccgccgtgctcaaacaggagcgtgcccacgaagtgggcgctcagggcgggcctccagtagcccaagtcgagcaggatctcccgatcagtcgagagaaccttactgacttagtggttgacacggacacactgggcgagagtactcagccccaaagagagggagctcaggtgcctacaggaagggaaagagaacagcacgttggcggcacaaaggattcagaggacaattacggggactctgaagacctcgatctccaggcgacccaatgcttccttgagaaccagggactggaagcagtgcagtctatggaagatgagcccactcaggcatttatgctgaccccgccccaagagcttggaccttctcattgttctttccagacaaccggcaccttagatgagccatgggaggtgctcgccacacaaccattctgtctcagagaatctgaggactccgagactcagcccttcgatacgcatctggaagcatatggaccatgcttgagcccgccaagagcaattcctggcgatcagcaccccgaatcccccgtacacaccgagcctatgggcatccagggtcgagggagacaaacagttgataaggtcatgggtattcctaaagaaacagccgagagagtgggccccgaacgcggcccacttgaaagggagactgaaaaattgcttcctgaacgacaaaccgacgttaccggagaggaggaattgacaaagggcaagcaggatagggagcagaaacagcttctcgctagggatactcagcgacaggaatcagataagaatggcgagagtgcctctcccgagagggacagagagtccctcaaagtggaaattgagacctcagaggagatccaggagaaacaggtgcagaagcagacactgccctctaaagcctttgagcgggaagtggaacggcccgtggccaacagagagtgtgacccagcagaattggaagagaaagttcccaaggttatcctagagagggacacccagcgcggtgagccagagggcggtagtcaggaccagaagggacaggccagttcccctactccagaacctggtgtgggggcaggcgacctgccaggccccaccagcgctcctgttcccagcggctcgcagtcaggaggcagaggttcccctgtgagtcctcggcgccatcaaaaaggcctcctgaactgtaagatgccacccgccgagaaggcgtctcgaatcagagccgctgagaaggtcagccgaggagatcaagaaagccccgatgcctgtttgccgcctaccgtgcccgaagctcccgccccgccccagaagccgctaaactctcagtcacagaagcacctggcaccgccaccgctcctttcacctttgctgccatctatcaaacctaccgtgcgtaagactagacaggatggctctcaggaggctccggaggctccactgtccagcgaactggagccctttcatccaaagcccaagatacgcactaggaagtccagtagaatgacccccttccctgcgacctcagctgcccccaagctggagccatctacttcaaccgatcagccagtcaccccggagcctacctcgcaagcaaccagaggaaggacaaatagatccagcgtcaaaacccctgaaactgtggtgcccacagcccccgagctccagccctccaccagtacagaccagcctgtgacgccagaacctacgagtcaagcgactcgtggccggactgataggagctccgtcaagactccagagacagttgtccctactgctcccgagctgcaggcctcggcttcaactgatcagcctgtcacctcagaacctacttcccgtactacccgcggtagaaagaaccgcagtagcgtgaaaacaccagaaaccgtcgtgccggcggctccggagctccagccctctacctccactgaccaaccggtaacacctgagcctacctctagagccacccggggccgcacaaacagatcaagcgtgaagaccccagagtcaatcgtgccgatcgctccggagctccaaccgtctaccagcaggaaccagcttgtgacccccgaacctactagcagggcaactaggtgccgaaccaacagaagttcggtgaaaacacccgaacctgttgtgcctactgcaccagaacctcaccctacaacttctacggatcagcccgtcacccctaagttaacgtctcgtgcaacccgtcgcaaaactaacaggtcttcagtcaagaccccgaaacccgtggaacccgcagcctccgacctggaaccattcaccccaaccgaccagtctgtgactcccgaggctatcgcccaaggcgggcagtctaaaaccctgcggtccagcacggtccgggcgatgcctgttccgacaacacctgagtttcagtcccccgtaacaactgaccaacctattagccccgagcctattactcagccatcgtgtatcaaaagacagcgagcagcaggaaaccctggctccctggccgcaccgatcgaccataaaccatgctctgcaccccttgagcccaagtcccaggcaagtcgtaaccagcgctggggagccgtcagagccgctgaaagcttgactgctatccccgagccagcaagccctcagctcctggaaacgcccatacacgccagccaaattcagaaggtggagccagcaggcagaagcagatttacacctgaactgcagcctaaagcgtctcaatcgcgtaaacgatccctggctaccatggatagcccgccccaccaaaagcagcctcagaggggagaagtttcccaaaaaactgtgattatcaaggaggaggaagaggatacggcagagaagcccggcaaagaagaggatgtcgtgacgcctaagcctggcaagcggaagcgggaccaggccgaggaagagcccaaccggatcccaagcaggtcgcttcgcaggactaagctgaatcaggagtctaccgccccaaaggtcttgtttacaggcgtcgttgatgctaggggtgaaagagccgtactcgccctgggtggtagcttggctgggtcggcagccgaggcctcacatttggtcacggacaggattcggaggacggtgaagttcctctgcgccctgggccgcggaatccccattctctcactcgattggcttcatcagtcgaggaaagccgggttctttctcccccccgacgagtacgtcgtcacagaccctgaacaggagaaaaattttggattctccctgcaggatgcgctctctagagcgagagaaagacgactgctagagggctacgaaatatacgtgactccaggtgtgcaacccccccctccccagatgggcgaaattatttcatgctgcggtggtacatatttacctagcatgccacggtcttacaagccacagcgcgtcgttataacctgcccccaggattttccccactgttctattccccttcgagtcggcctacctcttctcagccctgagtttcttctgaccggggtcctgaaacaagaggcaaaacccgaagcattcgtgcttagccctctcgagatgtctagtacatag

SEQ ID NO: 345702 - DNA, 6270 bp, Artificial Sequence
  derived and/or modified sequence
atggaagacacccaagccatcgattgggatgtggaagaggaagaagaaactgagcagtcttcagagtccctgaggtgtaatgttgagccggtgggtcgcctgcatattttttccggggcccacggccccgagaaagattttccactacaccttggcaagaatgtggtgggccgtatgcccgactgcagtgtggctctgccatttccttccatcagcaagcagcatgcagaaatcgaaattctggcatgggacaaggctcccattttaagagattgcgggagcctgaatggcacgcaaatcctgaggcccccgaaggtgctatctccaggcgtgtcgcaccgacttcgcgaccaggagcttatcctctttgcagatctactgtgtcagtatcaccgcctggatgtatcattacccttcgtctctcgaggtcctctgactgtcgaggaaactccacgtgttcagggggagacccagccgcagcgtttgctgcttgccgaggacagcgaggaagaagttgacttcttgagcgagcggcggatggttaagaaaagccgtactacgtcctccagcgttattgttcctgagtcagatgaagagggacattcgcctgtgttaggtggcttgggcccacccttcgcctttaatcttaattctgatactgacgtggaagaaggacagcaacctgcaaccgaagaagcaagctcagccgcccgtaggggagcaaccgtcgaagcaaaacagtccgaagcagaggtggtgactgagattcagctggagaaggaccagcctctggtcaaggagcgggacaacgacactaaagtgaaaaggggagccggtaacggagtagtccccgccggcgtaattcttgagagaagtcaaccaccaggcgaagacagcgacaccgatgtcgacgacgacagcagaccccccggcaggcccgctgaggtccacctggaacgagcccagccctttggcttcatcgattctgataccgacgcagaggaggagcggattcctgcaacccctgtagtcatcccaatgaaaaaaagaaagatcttccatggtgtgggtacccgaggtcctggtgcacctggactagcccacttacaggagtctcaggctggtagtgataccgatgtggaagagggcaaagcacctcaggcagtacctctcgagaagtcgcaggcatcaatggtaattaatagcgacaccgatgacgaagaagaggtctcagcagccctgacactcgcacaccttaaagagagtcagccagctatctggaaccgggatgccgaagaagatatgccacaaagagtggttcttcttcagcgatcacagaccacaaccgagcgggattcagacaccgatgtcgaagaagaggagctcccggtcgagaacagagaggccgtgctgaaagatcacacgaaaattcgggcactggtgcgtgctcacagcgaaaaagatcagccccccttcggggacagcgacgattctgtagaagcagacaagagcagccctggaatccatttggagcgcagtcaggcgtctaccacagtggatattaatactcaagtagaaaaggaagtcccaccgggatcagcaattattcacatcaaaaagcaccaggtcagcgtggaaggcactaaccaaacagacgtgaaagccgtgggtggacccgctaaactcctggttgtgagccttgaagaagcatggccactacatggtgattgcgagaccgacgccgaagaaggtacttcactgacagcgtccgtagtggcagacgtgcgtaagtcccagcttccggccgaaggggatgctggggccgaatgggcagccgccgtgctgaaacaggagcgcgcacacgaggtgggagcccaggggggccctcccgtggcacaggtggagcaggaccttcccatctcgcgtgagaatctgacagatctggtcgtggacacagacactttaggtgagagtactcagcctcagagggagggcgctcaggtccccactggacgggaacgggagcagcacgttggggggacaaaagactccgaggataactacggagactctgaagatctggatctgcaggcaacacaatgctttttagaaaaccagggactcgaagctgtgcaaagcatggaggatgaacccacccaggcttttatgttaaccccacctcaggagttgggccccagccactgttcattccagaccaccgggacgctggatgagccgtgggaggtgctcgcaacacaacccttctgtttgcgggaaagcgaggattccgagacccaaccttttgatacccacctcgaggcctatgggccttgcctctcccccccccgggccatcccaggtgatcaacaccccgaatcccccgtgcatacagaacctatgggaatccagggaagaggacgtcagaccgtggataaggtcatggggatcccaaaggaaactgccgagcgagtggggccagaacggggccctctcgagcgtgagacagaaaaactgctgccagaacgccagacagatgtgacaggagaagaagaactgacaaaggggaagcaggacagagagcaaaagcagctgctggcacgggatacccagagacaggagtctgacaaaaacggggaatctgcctccccagagcgcgatcgggaaagtttaaaggtagaaatcgagacctcagaggagattcaggaaaagcaagtgcaaaagcaaacactgccaagtaaagctttcgagcgggaggttgagaggccagtggccaatcgcgagtgcgacccagcagagctggaggagaaagtgccaaaagtcatccttgagagggacactcagagaggtgagccagagggcggcagtcaggaccagaaagggcaagccagcagtcccactccagaacctggcgtgggggccggggacctgccaggcccgacttcagctcccgtgccaagtgggagccagtctggcggccggggctctccagtttctccgcgacgtcaccagaaaggactgttaaactgcaagatgccgcctgcagagaaggcatccagaattcgcgcggctgagaaggttagtcgtggcgatcaagagagccccgacgcatgtctgcctccgaccgtacccgaagcccctgcaccccctcagaagcccctcaattcgcagagtcagaaacatctcgccccacccccattactgagccccttattaccttctatcaagcccaccgttaggaagaccaggcaggatggcagtcaagaagcccccgaggcgcccctgagctccgagctggagcctttccatcctaaaccaaagattagaactcggaaaagttcgagaatgacaccattccccgctacctcagcagcccccgagcctcaccccagtacatctacagcccagcccgtgacacctaagccgacctctcaggccacgaggtcccgcactaaccgcagtagtgtaaagacccccgagccggtcgtcccaactgcccccgaactgcaaccctcaacctctacagatcagcccgtcacatccgaacctaccagtcaggtgacaaggggaaggaagagccgcagttcagttaaaacacccgaaaccgtcgtgccaactgcacttgaactgcaaccctctacgtcgactgatagaccagttacctcagagccgaccagtcaggccacacggggcaggaagaatcgcagttcggttaagacccctgagccggtggtcccaaccgcccctgaacttcagccatccacaagtaccgaccaacctgtgacatctgagccaacctaccaagcaacacgaggacggaaaaatcgaagcagtgtgaagactccagagcccgtcgtgcccacagcgccagagctgaggccatctacttctactgaccgccctgtgacacctaaacctaccagtcgaactacgcggtcccgtactaacatgtcctcagtgaaaacccccgagaccgtcgtgcctaccgccccagagctgcagattagtaccagcacagatcagccagtgactccaaagcctaccagcaggaccacccgctctaggaccaacatgagttcagtgaaaaatcccgaatcaaccgtgccaatcgctcccgaactccctccaagcacctcaacagagcagcccgtgacgcctgagccaaccagccgtgctacgcggggcaggaaaaatcgtagcagcggaaagacacccgaaacccttgtgccaaccgctcctaaactcgagccctccacaagtaccgatcagccagtaactccagagccaacatcccaggctactcggggccgcaccaatcgatcctcagtgaaaactccagaaacagtggtgcccaccgcgccagaactgcagccttccactagtaccgaccaacccgtgacgcctgaaccaacctcccaggccacacgaggtcggactgatcggtcctcggtgaaaacacctgagacagtggtcccaaccgcccccgaactgcaagctagcgctagtaccgatcaacccgttacgtccgaacccacttcaaggacgactcgcggccggaaaaaccggagctctgtaaagacgcccgagacagttgtccctgccgcccctgcattacagccgtcaacttctaccgaccaacctgtgacccctgagccaaccagtcgagccacaaggggaagaactaatcgatcgtcagtgaaaacaccagaaagtatagttcccatcgcaccagagctgcagccttccacttccagaaaccaactggtcacgcccgagccaaccagccgcgccacccgctgcagaactaatcgtagctccgtgaagaccccagaacccgtagttccaactgcccctgagcctcaccctactacttcaaccgaccaacctgtgacgccgaaactgacttctcgcgcaacgcggcggaagaccaatcgcagcagcgttaagactccaaaaccggtggagcccgcagcctctgacctggaaccattcactcccacggaccaatctgtaacaccggaggccattgcccagggtggacagtctaagaccctgcgctcttctacagtccgggcaatgcccgtccccaccacccctgagtttcagagcccagttaccactgatcagccaatcagccctgagcctattactcagccgagctgtataaagcgtcaacgggctgctggaaatcctggctccctcgctgcaccaatcgatcacaagccctgctccgcccccttggagcccaaaagtcaggcctctagaaaccagcggtggggagccgttcgggccgcagaaagcctcaccgccatccccgagccggcttccccccaactgctcgagactccaattcatgcatcccagattcagaaggtggaacctgcgggacgctcacgatttaccccagaactccagcccaaggcgtcacagagcaggaagaggagcctcgctaccatggactcccctcctcatcagaagcagccccagcgcggcgaagtttcacagaaaactgttataattaaggaggaagaagaggatacagccgaaaagcccgggaaagaggaagatgtggtcacacccaagcccggaaagcggaaacgagaccaagcagaggaggagccaaaccgcataccgtcccgctcattgcggcggacaaaacttaatcaagaaagcaccgcccccaaagttctgtttacaggagttgtggacgcgaggggtgagagggccgtgcttgctctggggggcagcctggcaggaagcgctgccgaagcctcccacctggtaaccgaccgtattcgaagaacagtcaagttcctgtgtgccctaggcagaggaatccctattctttcactggactggttacatcaaagtcggaaggccgggttcttccttcccccagacgaatacgttgttaccgacccggagcaggaaaagaatttcggtttctctcttcaagatgctttgagcagggctagggaacgcaggctcctagaaggctatgagatttatgtgacacctggagtgcagcctcccccccctcagatgggtgagatcataagctgctgcggcggaacatatctccccagcatgcctaggagctataaaccccaacgtgttgtgataacctgtccacaagatttccctcactgttccattccactgcgcgtcggactgccacttctgtctccagaattcctgcttacaggagtcctcaagcaggaggcgaagcccgaggcattcgtcctctcccccctggagatgtcctccacatag

SEQ ID NO: 345703 - DNA, 5409 bp, Artificial Sequence
  derived and/or modified sequence
atggaggatacacaggcaatagactgggatgtggaagaagaagaggagacagaacagtcgagcgagagcttgcgttgcaacgtcgagccagtgggcaggctccacattttttcaggcgcccatggtccggagaaagacttcccccttcacctggggaagaacgtcgtggggcgcatgcccgattgcagcgtggctctcccgttccccagcatttctaagcagcatgctgaaatagagatactggcatgggataaggctcccattctgcgggactgcggcagcctgaacggcacccagatcctgcgcccacctaaggtgcttagcccaggtgtgagtcaccgcttgcgagatcaggagctcatccttttcgctgatttactttgtcaatatcaccggcttgatgtgagcctccccttcgtctctaggggccctctgaccgtcgaggagacaccaagagttcagggagagacacagcctcagaggctgctcctggccgaggactcggaagaagaagtggatttcttgagtgagaggcgtatggtcaagaaaagcaggaccaccagttccagcgtaatcgtgcccgaatccgacgaagaaggccactcccccgtgctgggaggattggggcccccattcgcctttaatctgaattcggacaccgatgttgaggaggggcaacagcctgccactgaggaggcatcttcggctgcgcgtaggggcgcaaccgtcgaggccaaacagtctgaagctgaggttgtaacggagattcagctggaaaaggaccagccgctggtgaaggagcgcgataacgatacaaaagtcaagaggggcgccggaaacggtgtcgtgcctgcaggcgtgatcctggagcgctcacaacctcctggggaagactccgacacagacgtggacgacgactcacgccccccaggcaggcccgcggaggtccatctagaacgcgctcaaccattcggcttcatcgactccgacaccgacgccgaggaggagagaatacccgcaacaccagttgtgattcctatgaaaaagcggaagatatttcacggagtgggaacaagagggccaggtgcccctggattggcacatttgcaagagtctcaagcgggctcggatacagatgtcgaggaggggaaagcccctcaggccgttccacttgagaagtctcaggcgagcatggttattaacagcgatactgacgacgaggaagaggtgagcgctgccctgaccctagctcacctcaaggaatcccagcccgcaatttggaatagggacgctgaggaggatatgccgcagcgcgtggtgctcctccagaggagccagacaaccacggagcgggatagcgacacagacgtggaggaggaagaactgccggtggaaaatcgcgaggccgtactgaaggatcatactaagatccgcgccctcgtccgagctcatagcgagaaggaccaaccccctttcggcgacagtgatgacagcgtggaagctgataagtcatctcccggtatccacctggagcgatcccaggcctccaccactgtagatataaatacgcaggtggaaaaggaagtcccgcccggaagcgccatcatccacattaaaaaacatcaggtgtctgtagagggcactaaccagaccgatgtgaaagcggtcggcggtcctgccaaactgctcgttgtgagcctggaagaagcctggcctctgcatggagattgtgagaccgatgctgaggagggcacctctctgactgctagcgtcgtcgcagacgttcgtaagtcccagttgccagcagagggggacgctggggcagagtgggctgctgcagtccttaaacaggaacgcgctcacgaggtaggcgcacagggaggcccaccagtggcccaagtggaacaggatttacctatttctcgtgagaacttgaccgacctggtcgtggatacggacaccttgggcgagtctacacagccacagcgtgagggggcccaggtgcctactggaagggagagggagcaacacgtgggtgggaccaaggactcagaagataattatggagatagtgaggaccttgatctacaggccacacagtgttttctggagaaccagggcctcgaggcagtacagagcatggaggacgagccaactcaggcattcatgctgactcctcctcaggagctcggcccatcccactgttctttccagactaccggtactctggatgaaccctgggaagtgcttgcgacgcagccgttctgcttgagggagtccgaggacagcgaaacacagccattcgatactcacttagaagcctacgggccctgcctttcaccacctcgagccatcccaggcgatcagcaccccgaaagccctgtgcatactgagcctatgggcattcaaggtagaggaagacagaccgtagataaggtgatgggcattccgaaggaaacggccgagagagtgggtccggaacgtgggcctctcgaaagggaaaccgagaagctgctgcccgagagacagactgacgtgaccggcgaagaagaacttacaaagggtaaacaagatagggagcagaaacagttgctcgctagagacacccagcgccaggagtctgataaaaacggggaatccgcctccccagaaagggatcgagagagcttgaaggtggagatcgaaacctctgaggagattcaggaaaaacaggtccaaaagcagacattgccgtccaaggcttttgaacgtgaggtcgagagacctgtcgccaatagagagtgcgacccagccgaactcgaggaaaaagtgccaaaggtcatcctggaaagggacacccagcggggggagcccgagggcgggtctcaggaccagaaggggcaagcaagctcacccaccccagagccgggggtgggcgctggcgacctgccgggccctacaagtgccccggtcccatccggctcccagtctggaggacggggttctccagttagccccagacgtcatcagaaaggattactgaactgcaagatgccccctgcagagaaagcatctaggattagagcggcggagaaggtcagccgtggcgaccaggaatctcccgatgcttgccttcccccaaccgtgccagaagctcccgctccaccccaaaagccgctcaactctcagtcccagaagcacctcgccccaccacccctgctctccccactgctcccgtcgatcaaacctaccgtgcgcaaaacacggcaggacggttcacaggaggcacctgaagctcccctgtcctcagaattggaacctttccatcccaagcctaaaattagaacccgaaagtcctccaggatgacaccctttcctgcaacgtcagcggctccaaagttagagccatcaacctctacagaccagcccgtgacaccggaacctaccagtcaggccacgcggggacgtactaatagaagctctgtaaagacgccggagacagttgtcccaacagccccagaactacagccgagcacaagtaccgaccagcccgtgacaccagagcctacgagccaggcaacacgcggtcggacagacagatccagcgtaaaaaccccagaaactgtcgtgccgactgccccagagctccaggcatctgcaagcacagatcagccagtgacctcagaacccaccagccggaccaccagggggaggaagaatagaagtagcgtaaaaacccctgaaactgtggtccccgcggcccctgagctgcagccctctacctccacagaccagcccgtcactcccgagccaacgtcacgcgctacacgtggccggactaataggagcagcgtgaaaaccccggagtcaattgtcccaattgctcccgagctgcagccgtccaccagtaggaatcaactcgtcacaccggagcctacttctcgcgcgactagatgcagaacaaacaggtcctcagttaaaactcccgagccagtggttccaacagcccctgaaccccaccctacaacgagcaccgatcagcctgttacaccaaagctgacaagcagagccactcgccgcaagacaaacagatcctccgtgaaaacacccaaacctgtggaaccagccgcgagtgaccttgaaccttttacgcccactgaccagtcagtgacaccagaagcaattgctcagggaggacaaagtaaaactctccgctccagcacggtccgggcgatgcctgtgcctacaacccctgaattccagagcccagtgactacggatcagcctatatccccagagcccataacccagccctcatgcatcaagagacagcgcgccgccggtaacccgggatccctggccgccccaatcgatcacaagccatgttccgcccctctggagcctaaaagccaggcctctagaaaccaacggtggggtgccgtgagagcagcagaatctctgactgcaattccagagcctgccagtccgcagctgctggaaactcccatacacgcctctcagatccagaaagtcgaacctgctggtcggagtagattcacccctgagttacagcccaaggcatcccaatcgaggaagcggtccctggctacaatggacagtcccccacaccagaaacaaccacagagaggcgaagtgtcccagaagactgtgattatcaaagaggaagaagaagataccgccgagaaaccgggaaaagaggaagacgtcgtgaccccaaagcccggaaagcggaaaagggatcaggctgaggaggaaccgaaccgcattccctctcggtctctgcggagaaccaaattaaatcaggaatcaaccgcccccaaagtgctgtttacgggcgtcgtcgacgctcgcggggagagagccgtgctggcattaggcggctccctggccgggagcgctgccgaggcttcccatctcgtcacagaccggattcgtagaactgtgaaatttctttgtgctctaggtaggggaatacctatattaagcctcgattggttgcatcaatcaaggaaggcaggatttttcttgccccccgatgagtacgtggtgactgaccccgagcaggaaaaaaacttcggcttcagccttcaggacgccctgagccgcgcccgagagcgcaggctgttagaaggctacgagatttacgtcacccccggtgtgcagcccccaccaccccagatgggagagattatcagctgctgcggggggacatatctaccttcgatgcctagatcctacaagcctcagagagtcgtcatcacttgtccccaggattttccgcactgttctatacctttgagggtgggcctccctctgttgtcccctgagtttttgcttaccggcgtcctcaagcaggaagccaagccagaggcatttgtgttatcgcccctggagatgagttccacatag

SEQ ID NO: 345704 - DNA, 5409 bp, Artificial Sequence
  derived and/or modified sequence
atggaggacacccaggccatagactgggatgtggaagaagaagaagagacagagcagtccagtgagagcctaaggtgtaacgtggaaccagtgggccgcctgcacatcttcagtggcgcgcatggtccagagaaggattttcccctccacttaggtaaaaacgtggtgggccggatgcccgattgtagcgtggctttaccctttccctccattagcaagcagcatgccgaaattgagatcttagcctgggacaaagccccaattcttcgggattgtggttcactaaacgggacgcaaattttgcggcctcctaaagtccttagccccggtgtctctcaccgactaagggaccaggagctgattctcttcgctgacctgttgtgccaataccaccgattggatgttagcttgccatttgtctctaggggacctctgaccgtagaggaaaccccccgagtgcagggcgagacccagccacagcggctcctgttggccgaggacagtgaagaagaagtcgactttttgtcagagagacggatggtgaagaagtcaaggactacgagctcttcggtgatcgtccctgaatccgatgaggaaggtcacagcccagtgttaggaggtttgggccccccttttgcttttaatcttaacagcgatacggacgtggaggagggccagcagccagctactgaggaagcttcctcagctgccaggagaggagctaccgtggaggcgaagcaatccgaggccgaggttgtaactgagatccagctggaaaaggatcagccactggtaaaagagcgtgataatgacacgaaggtcaaacgcggcgccggcaacggggtggttcccgctggagttatattagaaagatcccaaccgcccggcgaagactcagacactgacgtagatgatgactccaggccacctggaaggcccgccgaagtgcacctggagagagctcagccctttggttttattgatagcgataccgatgccgaggaagaacggatccctgccaccccggttgttattccaatgaagaaacgaaagatctttcacggcgttgggacccgcggtccaggcgctcccggacttgcccacctccaagagagccaggccgggtcagatacagacgttgaggagggaaaggccccccaggccgtgccgttggagaaatctcaggccagcatggtaatcaatagtgatacagacgacgaagaagaggtgtcagctgcccttactctagctcacctgaaagaatctcagcctgcaatctggaatagagatgcggaagaggatatgccgcagagggtggtcctcttgcaaaggtcacagacaacaactgagcgagacagtgatactgatgtggaggaagaagagctacccgtggaaaatcgggaggctgtattgaaagaccacacaaaaattcgggcgttagtccgggcccatagcgagaaagaccagcccccattcggggattctgacgattcagtggaagccgataaaagctcaccaggaatccacctggagagaagtcaagcctcaacaaccgtcgatattaacacacaggtggagaaagaagtgccacccgggtccgccattatccatataaaaaagcatcaggtttcagtggagggtaccaaccaaaccgacgtcaaggccgtgggcggaccagccaagttgctggtggtgtcgctggaagaagcgtggccgcttcatggtgactgtgagaccgatgccgaagaggggacatcgcttacggcttccgtggtggccgatgtgagaaaaagtcaactgccagccgagggagacgccggagccgagtgggcagccgcggtgcttaaacaagaacgggcacacgaagtgggcgcacagggaggaccccccgtcgcacaggtagaacaggatctacctatcagccgagaaaacttaacagatttggtcgttgacacagacactcttggtgaatccactcagccacagcgggagggggcgcaggtaccaactggcagagaaagagaacagcatgtgggagggacgaaggatagtgaggataattacggagattcggaggatctggacttgcaggcaacacaatgttttctagaaaaccaggggctagaggctgtgcaatccatggaagacgaacctacccaggctttcatgctgactccaccacaggagctcgggccctcccattgtagctttcagactactgggactctggacgaaccttgggaggtgctggcaactcagcccttctgcctgcgtgagtccgaagacagcgagacgcagccatttgacacgcatctggaagcctatggaccgtgcttgtcaccacctcgggccattcctggagaccagcatccagagagccccgtacacactgaacctatgggaattcagggacggggaaggcagacggtcgacaaagtcatgggtatacctaaagagacagctgagagagtggggccagaaaggggaccgctagagcgcgagactgaaaaactcctcccagagaggcagactgatgtgacgggagaggaggaactgaccaagggtaagcaagacagggagcagaagcagttacttgcccgggacacccagcggcaggagagcgacaagaacggtgaatcagcctcaccagaacgggatcgtgaaagcctcaaagttgagatcgaaaccagcgaagagatacaagaaaagcaggtgcagaagcagaccctgccgtcaaaggctttcgaacgggaagtggaacggcctgtggccaatcgcgaatgcgaccctgccgagctggaggagaaagttcctaaagtaatcctcgagagagacacgcagaggggagaacccgagggagggtcgcaagatcagaaagggcaagcttcttctccgacaccagaacctggcgttggagctggggatttaccaggacctacgtccgcaccagtgccaagcggatctcagtctggcggtcggggttctcctgttagcccaagaagacaccagaaaggactgttgaactgcaagatgcctccggccgaaaaggcgtccagaatcagggcagccgaaaaggtgtctagaggcgaccaggagtcgcccgacgcctgtctaccaccaactgtaccagaggcgccggcaccccctcaaaagccactgaatagccagtcccagaaacatctggctcctcccccattgctgtcacctctgctgccatctatcaagcccacagtgcgtaaaactcggcaggatgggtcccaggaagccccagaggcacccctgtcctccgaactagaaccattccacccaaaacccaaaatccgcaccaggaaaagctcccggatgactcccttccctgccacaagcgctgctccaaagcttgaaccttcaacgagcactgaccagcctgtgacccctgaaccaaccagccaagcgacacgcgggcggactaatagaagcagcgtcaaaactcctgagactgtcgttcctaccgcacccgaactgcaaccatcaacttcaactgatcagccagtgacccctgaacccaccagccaagctactcgcggaaggacggataggagcagtgtcaaaacccccgagactgttgtccccacggcacccgagctgcaggcttctgcatccaccgaccagccagtaacaagcgaacccacctctcgcactaccagggggcggaagaaccgcagttccgtgaagacgcccgaaactgtagttcccgccgccccagaactacagccatcaacgtccaccgaccagcctgtaacccccgagcccaccagtagggccacccggggacggaccaatagaagttctgtcaaaactccagaatcgattgtgccaattgcccctgaactgcagcctagtacctcccggaaccagcttgtcactccagagccgaccagccgcgccacacgatgtcggactaatagatctagcgtcaaaacccctgagccagtagttccaaccgcccccgagccgcacccaacaacttctaccgaccagccagtgacaccaaaactcacgtctagggccacgagaaggaaaaccaacagaagctccgtgaaaacccctaagccagtcgagccagccgcttcggatctggaaccgttcacacccaccgaccagagtgtcactcccgaggccatagcccagggaggccaatctaagactctacgttctagcaccgtgagggccatgcctgtcccaacaacacccgagttccagagcccagtgactaccgaccagcccatttcacccgaacccattactcagccgagctgcattaaaagacagcgagctgctggtaaccccggatcactagctgcaccgattgatcacaagccttgcagcgcaccgcttgaacctaagagccaggcttctaggaatcagcgctggggcgccgttagagcagccgaatcattgacggcaatccctgaacccgcttcgccacaattgctcgagaccccaatccacgcatcccaaatacaaaaggtggagccagctggaaggagcaggttcacacctgaactgcagccaaaggcgtctcagtcccgcaagagaagtctcgccaccatggatagcccaccccaccagaagcagccacagcgcggggaggtgtctcagaagacagtgataattaaagaagaggaagaagataccgcagagaaacccggaaaagaagaggatgtagtgaccccgaaaccgggcaagcgcaagcgcgaccaggccgaggaagaacccaaccgcattcctagccgcagcctgcggagaaccaagctgaatcaggagagcaccgcaccaaaagtattgttcaccggagtggtggacgctcgtggggaacgtgccgtgcttgccctgggaggttccctcgctggctccgccgctgaggcatctcatctggtgacagacaggattaggcgcaccgtgaaattcctgtgcgctcttggtagggggatacccatcctctccctggattggctacaccagtctcgtaaagccggcttcttcctgccacctgatgagtacgtcgttacggatcccgagcaggagaagaactttggcttctcgctacaagacgcattgtcacgagcacgcgaacggcgcttgctggaaggctacgaaatatacgttactcctggggtgcagcctcctccgccccagatgggagagatcatctcatgttgtggtgggacatacctcccttccatgccaaggtcctacaaacctcagcgcgtcgtaatcacttgtccccaggatttccctcactgttccattcctttgagggtcgggttaccgctccttagccccgaattcctgctgaccggcgtgcttaaacaagaggcaaagccagaagctttcgtattgagccctctggagatgagtagtacctag

SEQ ID NO: 345705 - DNA, 5409 bp, Artificial Sequence
  derived and/or modified sequence
atggaagacacgcaagctattgactgggatgtggaagaggaggaagagaccgaacagtcctccgaatccttaagatgtaacgttgagcccgttggcaggctccatatcttctccggcgcgcatggccccgagaaagacttccccctccacctggggaaaaatgtggtcggaagaatgccggactgcagcgtcgccttaccgttccctagcatatctaagcaacacgccgagatcgagatactggcctgggataaggcgcccatcctcagagactgtggctcactcaacggcactcaaattctgcgaccccccaaagtgctctctcctggcgtcagtcaccggttgagagatcaggagctgattctgttcgccgacctgctttgccagtaccatagactggatgtcagcctgcctttcgtttctcgcgggccgctgaccgtcgaggagactcccagggttcaaggcgagactcagccccaacgcctgttgctggcggaagattctgaagaagaggtagactttctcagcgaacgtaggatggtcaagaaatctcgaacaacttcctcatccgtaatagtgcccgagagcgatgaagaggggcatagtcctgtactgggggggttgggtcctccgtttgccttcaatttaaacagcgataccgatgtggaggagggccagcagcccgcgaccgaggaagcctcaagcgccgcaagaagaggcgcgacggtggaagccaagcaatcagaggcggaggtggttacagagatccagctggaaaaagatcagcctctcgtcaaagaacgggacaatgatacgaaggtcaagcggggcgccggaaacggggtagtcccggcgggagtgatcctggagcgcagtcagccgcctggcgaagatagcgacactgatgtcgatgatgacagccggccaccaggccgaccagcagaagtccacctggagcgtgcacaaccatttggatttattgattcagacactgatgccgaggaagagaggatcccggccacccctgtggtcatacctatgaagaagcgtaaaatcttccacggggtcggcacccgcggccctggggcgcccgggctggcgcacctacaggagtcccaggctggcagcgacacagatgtagaggaaggaaaagctccccaggccgtgcccttggaaaaatctcaagcttcaatggtgattaacagcgacactgacgacgaggaagaagtgagcgccgctttaactctggctcacctaaaggaatcccagcctgcgatctggaacagagacgccgaagaggacatgcctcagcgagtggtactgttgcaacggtcgcagacgacaaccgagagagatagtgatactgatgtggaggaagaagaactccctgtcgagaacagagaggcagtgttaaaggatcacacaaaaatcagagccctggttagagcccatagtgagaaggatcagccaccttttggggattcggacgacagcgtcgaagcagacaaatctagcccgggcatccatctcgaacggagccaagcctcaaccaccgtggatatcaatacacaagttgaaaaggaggttccccccggctcagctattatccacataaagaaacaccaggtttctgtcgagggcaccaaccagacagacgttaaagccgtcggcgggcccgccaagctcctggtagtgagcctggaggaggcttggccacttcacggagattgcgaaacggacgcagaagaggggacctctctgacagcatctgtggtggccgatgtgagaaaaagccagctgcctgccgaaggagacgccggcgcagagtgggcagctgccgtcttaaaacaggagcgggctcacgaagtcggcgcgcagggtggcccacctgtcgcccaggtagaacaggacttgcccatatctagggaaaatctcacagacctggtggtggatacggacaccctgggggaatctactcaaccccagcgagagggcgcgcaggtccccacaggtagggagagggagcagcatgtcggtggcaccaaagactccgaggataactatggagactctgaggatctcgatctccaggccactcagtgtttcctcgagaaccagggacttgaggcagtccaaagcatggaagatgagccaactcaggcttttatgctgacgcctccacaggaactgggacccagtcactgtagttttcaaaccaccggtactctggacgagccgtgggaggtcctcgccacacagcccttttgtcttcgagaatcagaagactccgaaacacagccgtttgacacacacctcgaggcctacggcccttgcctgtcaccacctcgcgcaatcccaggggaccagcatcctgagagccccgtccatactgagcctatgggaatacagggccggggtcgccagaccgtggataaagttatggggattcccaaggagactgctgaacgcgtcggaccagagcgcgggcctctggagcgtgaaacagaaaagctgctccccgaacgtcagaccgatgtgacgggagaggaggaattgaccaaagggaagcaggacagggaacagaagcagctgcttgcccgggacacacagcggcaggaatcagacaaaaatggagaatcggcctcccctgagagggatagggagagtctgaaggtcgagatcgagacatctgaggagatccaggagaagcaggttcagaaacagacccttcctagtaaggcctttgaacgagaggtggaaagaccagtggctaatagagagtgcgatccggctgagctcgaagaaaaggtgcctaaagtcattcttgagcgggacacgcagcgcggggagcctgagggcggctcacaagaccagaagggtcaggcgtctagcccgactcccgagcccggcgttggcgccggtgatcttcctggtcccacaagtgcacctgtgccgtcggggagtcagtcagggggccgcggcagtcccgtatctccacgtcgacaccagaagggcctcttaaactgcaagatgccacctgcagagaaggcatcgcgtatacgggcagcagagaaggtgtcacgcggcgaccaggagagtcccgacgcatgcctgccccctacagtacccgaagcaccagcgcctcctcagaaaccgctgaactcacagagtcagaaacacctggccccaccacctctactatctcccctgttaccatccataaagccaaccgttaggaagaccagacaagatggcagtcaagaggccccagaggcgcctttgagcagcgagctcgagccatttcacccgaaaccaaagatccgcactcggaagtctagcagaatgactccattcccagccacctccgctgcgccaaaactcgagcctagcacctcaacagatcagcctgtgacccccgagcctactagccaggccaccaggggtaggaccaatcggagctccgttaaaacccccgaaacagttgtgccaacagcacctgagttgcagccttccacatcaactgatcagcctgtgacaccagagccaacatcccaagccactagaggtcgtacagatcggtcatccgtcaaaacaccagagacagtcgtccccacggcgcctgaacttcaggcatctgccagcactgatcaacccgtcaccagtgaacctacatccagaaccactcgaggcagaaaaaacaggtcttctgtgaaaactcccgaaacggtcgttccagccgccccagagctccaaccctctaccagcactgaccaacctgtcacccccgagcctacaagtcgcgccactcgcggccggactaatcgctcatctgttaaaacacccgagagcatcgtgcctattgctcccgagcttcagccctccacctctcggaaccagctggttacccccgagccaacatctagagcgacaagatgtaggaccaatcgttcctcagtaaagacccctgagcctgtcgtcccaaccgcccctgaaccccatccgactaccagcaccgaccaacccgtgactcccaagctgaccagccgcgcaactcggcgtaaaaccaaccgttctagcgtgaaaactcccaaacccgtggaacctgccgcatcagacctggaacccttcaccccaactgatcagagtgtgacacctgaagcgattgcccagggcggacagtccaagaccctaaggagcagcacagtccgggccatgcctgtgccaaccacccccgagttccagtctcccgtcaccaccgatcaaccaatttcccctgaacctattacacagcccagttgcattaaacgacaaagggctgctggcaaccccgggagcctcgcagcccccatcgatcataagccatgttcagcccccttggaaccaaaaagccaggcaagtcgaaatcagaggtggggcgcggtgcgggcagccgagtctctgactgctattccggagcccgcatcccctcagctgctcgagactccgattcacgctagccagattcaaaaagtggaaccagctggtagatcccgatttactcctgagctccagccaaaagctagccagtcgaggaagcgctcccttgccacaatggactcaccccctcaccagaagcaaccccagagaggcgaggtgtcccagaagaccgttatcataaaagaggaagaggaagacacggccgagaaacccggtaaagaggaggacgtggtgactcccaagcctggcaaacgcaagagagaccaggcagaggaggagcccaaccgaatccccagcaggtccttacgccgcacaaagctcaaccaggaatccactgcccccaaagttctttttactggggtagttgatgcacgcggggaacgggcagtgctggccttgggcggttctctggcagggagcgcagccgaggcctctcacctggtcacggatcgcatccgaagaacggtgaaattcttatgcgccctgggtcggggcatcccaatcttgagcctggactggctgcaccagtctcgcaaagctggcttctttctgcctcccgatgaatatgtggtgaccgacccagaacaggagaaaaacttcggtttcagcttgcaggatgctctcagccgcgcaagagaaaggcgacttctcgagggatacgaaatatacgtgactcccggggtgcagcccccccctcctcagatgggcgaaatcataagctgctgcggtgggacctacctcccaagcatgcccagatcatacaaaccccagcgagtcgtaatcacctgcccccaagacttcccccattgttctattcctttgcgggtgggcctgcctctgttatcgcctgagttcctcctgacaggagtactgaagcaggaggcaaaacccgaggcctttgtcctgagtccactcgaaatgtcttcgacatag

SEQ ID NO: 345706 - DNA, 5409 bp, Artificial Sequence
  derived and/or modified sequence
atggaggacacgcaggccatcgactgggatgtggaggaggaggaagaaaccgagcagagcagcgagagcctacgatgcaatgtggaacctgtggggcgattgcacatcttttcaggtgctcacggccccgagaaagatttccccctgcatttaggcaagaatgtcgtgggacgaatgccggactgcagtgtcgccctcccattccccagcatatccaaacagcatgccgagattgaaatcctggcctgggataaggctccaatcctcagagactgcgggtctctcaacgggacccaaatcctacgccctcctaaggtgctgtcccccggggtcagtcaccggctgagggatcaggaactgatcctgttcgcagatttgttgtgtcagtatcaccgcttggacgtgtcgctgccttttgtatcaagaggtcccctgaccgtcgaggaaactcccagggtccagggcgaaacccaaccccaaagactcctgctggccgaggatagcgaggaagaggtggattttctgagcgagagacgaatggtcaagaagtcgcgcacaaccagctcatctgtcatagttcccgagagtgatgaggagggacatagccctgttctcggaggcctgggcccaccttttgcttttaacctgaacagcgataccgacgtcgaggaaggccaacagcctgccactgaagaggcctcgtccgctgctcgcaggggcgcaacggtagaggctaagcaatctgaggcagaggtcgtaaccgaaattcaactcgaaaaggaccagccccttgtgaaggagcgggacaatgataccaaggtaaagcgtggcgctggcaacggggttgtacccgcaggagtgatccttgagcgtagccagccccctggggaagacagcgacacagatgtagacgacgattctcgcccacccgggcgtccagcggaggtgcacctcgagcgagcgcagcctttcgggttcatagatagtgataccgacgccgaagaggagcggatccctgctactcctgtggtgattcctatgaagaaaagaaaaatcttccacggtgtggggactcggggccctggggcacctggccttgcacacctccaggaatcacaggccgggagtgacaccgacgtggaggagggaaaggcgccacaggctgtgccactcgagaagagccaagcaagtatggttataaattccgacacagacgacgaagaggaagtgtcagctgctctgactctggctcacctgaaggaatctcagccggccatctggaatcgggacgccgaagaagatatgcctcagcgcgtggtcttgcttcagcgcagtcagactacaaccgagcgcgacagtgacactgacgttgaagaggaggagctgcccgtcgaaaatcgtgaagctgtgctgaaggaccacaccaagatcagggccctggttagagcccattccgaaaaagatcagccaccctttggggactctgacgattccgttgaggccgataagagttctcccggcattcatctggaaaggtctcaggcctcgaccactgtcgacatcaatacccaggtggaaaaggaggtgccccccggcagcgctattatacacattaagaaacaccaagtaagtgtcgaggggacgaaccaaaccgatgtgaaggccgttggtggccctgcaaagctgcttgtcgtatctctggaagaagcctggcctcttcacggggactgcgagactgatgccgaagaaggcactagtctgacggcaagcgtcgtcgcagacgttcgaaagtcacagctccctgcagaaggcgatgccggagccgagtgggcagcagctgtgttgaagcaggagagggcccatgaagtcggagctcagggagggcctccggtggcccaggtggagcaagatctgccgattagtcgggagaacctcacagacctagtggtagacaccgataccctgggtgaaagtacgcagccacaacgtgagggcgcccaggtgccaaccggcagggaaagggagcagcacgtgggcgggacaaaggactccgaggataactatggagattctgaggatcttgacttacaagctactcaatgctttcttgagaatcagggcttggaggccgtccagagcatggaggacgaacccacacaggccttcatgttaacacctccccaggaacttggcccctcccactgctccttccagaccaccggaaccctggacgagccgtgggaggtcctggctactcagcccttctgccttagagaaagcgaggacagcgagacccagccattcgacacccacctggaggcatatggaccatgcttatctcccccaagggcaattccaggggaccagcaccccgagagcccagtccacactgagccaatgggaatccagggacggggtaggcagaccgttgataaggtgatggggatccctaaggaaaccgccgaaagggtgggcccagagcgaggtcctctcgagagggagacggaaaaactgttgccagagcggcagaccgacgtaacaggggaagaagaattaacgaagggcaaacaggaccgcgaacaaaaacagctgcttgcccgggatacgcagagacaagaatctgacaagaacggggaatccgccagccccgaacgcgacagggaatcactgaaagtggaaatcgaaaccagtgaagaaattcaagaaaaacaggttcaaaaacaaactctgccaagcaaggcatttgagcgggaggtggagcgacccgtagcgaatagagaatgtgaccccgctgaactggaggaaaaggtcccaaaggtgatcctagagcgagacacacagcggggggagcctgagggagggtcccaggaccagaaggggcaggcctcatcccctactcccgaacccggagttggtgccggggatctgcccggtcctacttctgcgcctgtgccgtctggcagccagtcgggcggacgtggaagcccagtgagccctagacgacatcagaagggtctgctcaactgtaaaatgccgcctgctgaaaaggcttcgcggattcgagctgcagaaaaggtgagtaggggcgatcaggaatcccccgatgcatgtctgccccccactgtgcccgaggcccccgcgcctccgcagaagccactgaatagccagagccagaaacacctggccccccctcctctcctgtccccacttttaccttccatcaaacccacggtaagaaaaacccgtcaagatggctcacaggaagccccagaagctcccctttcatctgaactggagccattccatcctaaacccaaaatccgaactcgcaaatccagccgcatgacacccttccccgccacatcagccgcacctaagctggaaccaagcacctcgaccgatcaaccagtgaccccggaaccgacctctcaagcaacaagggggagaacaaataggtccagcgtgaaaacccccgagacggttgtccccactgcccccgaactgcagccttcaactagcactgaccagcccgttacccctgagccaacttcacaagccacacgggggcgtactgaccgcagcagcgttaagacccctgaaactgttgtgcccacggcacccgagttgcaagccagtgcgtcgacagatcaaccagtaacctcggagccaacgtctcgcactacacggggcaggaagaatcgctcatccgtgaagaccccagagacggtggtgccagctgcgcccgccctgcaaccttccaccagtacagaccaacctgtaacacccgagccaacgtccagagccacaaggggacgcacaaaccggtccagcgttaagacaccagaatccattgtgcctattgctccagaactccagccatcgactagccggaaccagctggttacccccgaaccgaccagtcgagcgacacgttgtaggaccaaccgctcctcggtcaagactcccgagccagtagtgcctaccgctcccgagccccaccccactacatctacagatcagccagtgacacctaagttgaccagtagagcaacgaggcgcaaaactaaccgctctagtgtgaagactcccaaaccagtggagccagctgcatctgacctcgaaccattcaccccaaccgatcagagcgtgactccagaggctatcgcacagggtggccagtccaagacactgagatccagcaccgtccgggcaatgcctgtccccaccaccccagagttccagagtcccgtcaccaccgatcagccaatatcccctgaaccaattacccaacctagctgcattaaaagacaacgagccgctggcaatccaggcagcttggccgctcccatcgatcacaaaccctgcagcgctcccttagagccaaagtcccaggcaagtaggaatcagagatggggtgctgtgcgtgcagcagaatccctcacagctattccagaaccagcttccccacagctgctcgagacacccatccacgcatctcagatccagaaggtggagccagccgggcgaagcaggtttacacccgagcttcaaccaaaggcgagccagagtcgcaagagaagtctggcaactatggacagccctccccaccagaagcagccgcagagaggcgaagtttcacagaagacagtcatcataaaggaggaggaggaggacacagctgagaaacctgggaaggaggaggacgttgtcacacctaaacctggcaagagaaaacgcgaccaggcagaagaggagcccaatcggataccttctcgcagtcttcgccgcacgaaactaaatcaagagtctactgcacctaaagtcctgtttacaggagtcgtcgacgctagaggggaacgcgccgtgctggctttaggtggaagtctcgccggcagtgccgcagaagctagtcatcttgtgacagaccgtatccgcagaacagtgaagttcctctgcgctctgggaaggggcattcccattttaagtcttgattggctccatcagagcagaaaggctggattttttctccctcctgacgagtatgttgttacagacccggaacaagagaagaacttcggcttctccctccaagatgctttatctcgagcccgcgaacgtcgtctgttggaaggatacgaaatttacgtgacccctggggtccagccaccccccccccagatgggcgagatcatttcctgctgcggcggtacgtacttgccatccatgcctagatcatacaagccccagagggtcgtgatcacctgcccacaggatttcccgcactgctctattccgctgcgagtgggtctcccgcttctgagccctgagtttctcctgacaggggtgttgaaacaagaagctaagccggaggccttcgtgttatcccctctcgagatgtcctctacgtag

SEQ ID NO: 345707 - DNA, 5409 bp, Artificial Sequence
  derived and/or modified sequence
atggaagatacacaagccatcgactgggacgtcgaggaagaagaagagacagagcagtcctcggagagtttgaggtgtaatgtggagccagtgggaagactgcatatatttagcggcgcccacgggcctgagaaagactttcctctgcacctcggaaagaacgttgtgggtcggatgcccgattgctccgtggcactgcccttcccatctatttcgaagcagcacgccgagatcgagatcctggcttgggacaaagccccaatacttcgcgactgcggtagtctgaatggaacccaaattcttcgtcctcctaaggtgctctcacctggtgtgagccataggctgcgtgatcaggaactgatcctgttcgcggatctgctttgccaatatcatcggctcgatgtttctttgccttttgtgagcagaggccctctcacagtcgaggagacaccaagggtgcagggtgagactcagccccagcgtctgctcctagcagaggactctgaagaggaggtggatttcctatctgagcggaggatggtgaagaagtctcggaccacttcttcatccgtgattgttccagagtctgatgaggagggccactcgcccgtgttggggggtctcggccctcctttcgcctttaatctgaactccgacaccgacgtggaggagggacagcaacctgctaccgaagaggcatcttctgccgcacggcgtggggccacggtcgaggccaaacagagcgaagcagaagtagttaccgaaattcaactggagaaggaccagcccctggtgaaagagagggacaatgacacaaaagtaaaacgcggcgcaggcaacggcgtggtgccagcaggagtgattctagaacggagccaaccacctggggaggattctgatacggacgtcgatgatgactctcgtcctcctggccgcccagccgaagtccacttggaacgggcccaaccttttggcttcatcgactcggacactgatgccgaagaagaaagaatccctgcgactccagtcgtcatccctatgaaaaagcgtaaaattttccatggtgtcggtactagaggtccaggcgcgcccggactagcacacctgcaggaaagtcaggcaggcagcgatacagatgtggaagaagggaaggccccgcaggccgtgcctctggagaagagtcaggccagcatggttattaattccgacacggatgatgaggaggaggtcagcgccgcacttactctcgcacatcttaaggagagtcagccggccatctggaatagggatgctgaagaggacatgccacagagagtggtcctgttacaacggtctcaaacgactacagagcgggattcagacacagatgtggaagaggaagaactgcctgtggaaaatagagaggctgttctcaaggatcatactaaaattcgggccctcgtgcgcgctcactcagagaaagaccagcccccttttggagattcagacgactctgttgaggcagacaagtcaagtcctgggatccaccttgaaaggtctcaggccagtacaactgtggacataaacacccaagtggagaaagaagtgcctccaggaagtgccatcatacatattaaaaaacaccaggtgtccgtggagggcaccaaccagaccgacgtgaaagcagtaggaggtcctgcaaaactgctggtggtcagtctggaggaagcgtggccactccatggcgattgtgaaaccgacgcagaagagggtacatccctcacagcctcggttgtcgctgatgtccgcaagtctcagctccctgctgaaggtgacgcaggcgcggaatgggctgctgctgttctgaagcaggaacgcgcccacgaggtgggggcacagggggggccccctgttgcacaggtcgaacaggacctgcctatttctcgggagaacctgaccgacctagtggttgacaccgataccctgggggagtccactcagcctcaaagagaaggtgcccaggtgcctactggtagagagcgggagcagcacgtcggaggcactaaagactccgaggataactacggcgactcagaagatttagacttgcaagcaacacagtgctttctggaaaaccaaggccttgaggccgtacagagcatggaggacgaacctacacaagcattcatgctgacacctccccaagaactgggaccaagccactgcagtttccaaacaactggaacactggacgagccctgggaggtactggcgactcaacccttctgcctacgggaatccgaagactcagaaacacagccctttgacacacacttagaagcctacggtccatgtctgtctcccccacgcgcgataccaggtgatcagcaccctgagtcccccgtccacacagaacccatggggatccaaggtcgtgggcggcagaccgtggacaaggtgatgggaatcccaaaggagacagcagagcgggttgggcccgagcgaggtcccctggaaagggaaacggaaaagctccttcccgagcggcagaccgacgtcacaggcgaggaggaacttacaaagggaaagcaggaccgtgaacagaagcaactactcgctagagatacacagagacaggagtctgacaagaatggcgaatcagcttcccctgagagagaccgcgagtcactcaaggtggagatcgagactagcgaggagatccaagagaagcaggtacaaaaacaaaccctgccgtctaaggcgttcgaaagggaggtcgaacgaccagtggcaaaccgggagtgcgatcccgccgagttggaggagaaggtgcccaaggtcatcctggaacgagatactcagcgcggggagcctgaggggggatcccaagaccaaaagggtcaggccagcagccccaccccagaacctggcgtgggggccggggatctgccaggccccacttccgcaccggtgccatcaggcagccaaagcggcgggcgcgggtcaccagtatctcctcgtcggcaccagaaggggttactaaactgtaagatgccacctgcagagaaagccagcaggattcgcgccgcagagaaggtttcgaggggagatcaagagtcgccagacgcgtgtctgccccctaccgtgcccgaagcaccagcccctccgcagaagcctctgaactcccagtcgcaaaaacacttagcacccccacctttgctgtcaccactgctgccctcaattaaacccactgtaagaaaaacgcggcaggatggatctcaagaggcacccgaggcaccgctgtcatcagagcttgaaccgttccatcctaagcctaaaatcaggaccaggaagagctctagaatgactcccttccctgccacgagcgctgcgccaaagctcgagccgtccacaagtacggatcagcctgtcacaccagagcctacgtcacaggcgacccggggcagaacaaatagatccagcgtcaagacccctgaaacggtggtgcctactgcccccgagctccagcccagcacttcgacagaccaaccagtaactccggagccgacaagccaggccaccaggggaagaaccgatagatcttcagtgaaaacccccgaaacagtcgtacccacagctccagagctgcaggccagcgcatctacggatcagcctgtgactagtgaacctactagccgcacgacaaggggcagaaagaataggtcttccgttaaaaccccagagaccgtggtgcctgccgctcctgagttacaaccgagcacatcgaccgaccaaccggtgacccccgaacctacgtcccgcgccacccgcggcaggacgaaccggtcctccgtgaagactcctgaaagcatcgttccaatcgccccagaactgcagccgtctaccagcaggaaccagttggtgaccccagaacccactagtagggcgaccaggtgccgcacaaacaggtcgtccgtcaagactcccgagcctgtggtcccaactgcacccgagccccatcctacgactagcaccgaccagccagttacaccaaaactgacatccagggctacaaggcgcaagaccaacaggtcttcagtgaagacaccaaagccagtggaacccgctgccagcgacctggaaccctttacgcccactgaccagagcgtgactcccgaagccatagcccagggcggccagtccaagacccttcgctcctccaccgtgcgggctatgccggtgcctactactcccgaattccagtctcctgtaactaccgatcaacccatctctccggagcccatcactcagccatcatgtatcaagcgtcagagagctgccggaaacccggggtcactggcagctcccatagaccacaaaccttgtagtgccccactggagccaaaaagccaggcctccagaaaccagaggtggggtgcagtgcgcgccgccgaaagcctcacagctatcccagagcccgcaagcccacagctcctcgagacacccatacacgcttctcagatccagaaggtcgaacctgccggccgatctcgttttacgccagaactgcagcccaaggcctcccaatctcgtaagcgttcgctcgcaaccatggacagccctccacatcagaaacagccgcaacgcggcgaggtttctcaaaaaactgttataataaaagaggaagaagaagatacagccgagaaacctgggaaagaagaagatgtcgtgaccccaaagccgggcaagcggaaaagggatcaggccgaggaggagccgaacagaattccatccaggagcctccgcagaaccaagcttaaccaggagagcacagccccaaaggtgctgtttacaggggtggtcgatgctcgcggagagcgcgccgtgctggcactggggggatccctagccggttctgccgctgaagcaagccacctagtgacggatcgaatcagacggacggttaagtttctgtgcgccttgggacgaggaattcccatcctcagtctagactggctccaccagtcgcgaaaggcaggcttttttctgccgcctgatgaatacgttgttaccgatcccgaacaggagaagaactttggattctctctacaagacgcgctgtccagggctcgagagcgccggctgctcgagggttatgagatctatgtgactccgggggtgcaaccacccccaccccagatgggggagatcatctcttgctgtggtggtacgtacctgccatctatgcccagaagttacaagcctcagagagtggtgatcacatgcccccaagattttccgcattgttctatcccgctgcgcgtgggtttgccactgctgtctcctgagtttttattaacaggcgtgcttaagcaggaggccaagcccgaggccttcgtcttgtctccactcgaaatgtcatcaacctag

SEQ ID NO: 345708 - DNA, 5409 bp, Artificial Sequence
  derived and/or modified sequence
atggaagatacgcaggcgatcgattgggacgtggaagaggaagaggagactgaacagtccagcgagagcctaaggtgtaacgtggagccagtaggccggcttcatatctttagtggtgcccacgggccagaaaaagactttcctctgcatctgggtaagaacgttgtagggcggatgcctgactgcagtgttgccttgccattccccagcatcagtaagcaacacgctgagatcgagatccttgcttgggacaaagctccaatccttcgcgattgtggcagtctcaacggaacgcagatcctgcggccacccaaagtgctgtctcccggagtgtcacaccggttgagggaccaggagctgattctcttcgccgatcttctgtgtcagtatcatcgtctggacgtcagccttccctttgtttcccgggggccactgaccgtagaggagactccacgtgtccagggggagacacagccacaacgactactcctagcagaagacagcgaagaggaggtggatttcttgtccgaacgacgcatggtgaagaagtcacgaaccaccagtagtagtgttatagttcccgaaagtgacgaagaagggcatagccccgtccttgggggactgggtccaccctttgccttcaacctaaacagtgacacagacgtagaggaaggccagcaaccagcaactgaggaggcctcatctgccgctaggagaggagcaaccgttgaggcgaaacagagcgaagctgaagtagtgactgagatccagctggaaaaggaccagccgttagtcaaagaacgtgacaacgacaccaaagttaagagaggcgccggtaatggggtggtaccagctggggtgatcctggaacgctcgcaacccccaggtgaggatagtgatactgacgtggatgacgactctcgccctcccggtaggcccgccgaagtgcacctggaaagagctcaacccttcggtttcatcgattctgatacagacgctgaggaagagcggatcccagccacaccggtcgtgatcccaatgaagaagagaaagatttttcacggggtcggtacacggggacccggtgctcctgggctggctcatctgcaggagtcccaggcaggttcagatacagacgtggaggaaggcaaagcaccccaggccgtgccactcgagaagagtcaggcttctatggtgattaatagtgatactgatgacgaggaggaggtcagtgctgcccttactctggcccaccttaaggagagtcagcccgcaatctggaaccgagacgccgaggaagatatgccgcagcgtgtcgtgctgctacagcgcagccagacaactacagaacgagattctgatactgacgttgaagaagaagaactgcccgtcgaaaatcgcgaagccgtactaaaggatcacaccaagatcagggctctggtcagggctcattcagaaaaagaccagcctccattcggcgattccgatgatagcgtggaagctgataagagctcgcccggtatccacttggagagatcacaggcaagcacaacagttgacatcaatacccaagtggagaaggaggtacctccaggctccgcaattatacacataaaaaaacaccaggtcagcgtggaagggaccaatcaaacagatgtcaaggccgttggtggacctgccaagctcttagtggtcagcctggaggaggcttggcctctgcacggagattgtgaaacggatgctgaagaaggtacgtcgctcaccgcttctgtggtggccgacgtccggaaaagccaactccctgccgagggcgatgcaggagcagagtgggcagctgccgtgctgaagcaggagcgcgcccatgaggtcggcgcacagggaggtcctccagtcgcccaggtcgagcaggatctgcctatatcccgagagaatctgaccgaccttgtcgtcgacaccgacaccctcggggagagtacccagccccaacgagagggcgcccaggtgccaactggccgagagcgagaacagcacgtgggcggcacaaaggatagcgaagacaactacggggactcagaagatctggaccttcaggccacccagtgtttcctggagaatcagggtctggaagccgtacagagtatggaagatgagccgacacaggctttcatgttgacccccccccaggagttgggccctagccactgctcatttcagaccacagggacactggatgagccttgggaggttctcgccacccagccattttgtctgagggagagcgaagattcggagacacagccttttgatacccatctggaggcttatggaccttgtttgtcccctccccgcgctatacctggggaccagcaccccgaatcccctgtacataccgagccaatgggcatacaggggaggggcagacagaccgtggacaaggttatgggtattcccaaagaaacggcagagagggtggggccagagagaggtcctctggagagagagacggaaaaacttctgccagagagacagactgatgtgactggagaggaggaattaaccaagggcaaacaggatagggagcagaaacagctcctcgccagagacacacagcgccaggagagtgacaaaaacggcgagtccgcttctcccgaaagagaccgagagtccctgaaggtggagatcgagacatccgaggaaattcaagagaagcaggtccaaaaacagactctaccatcaaaagctttcgagcgcgaggtggaacggccggtggctaacagggagtgcgatcctgccgagcttgaggagaaggtacccaaggtgattctcgaacgcgatacacaacgtggcgagccggagggtggctctcaggatcagaagggccaggctagtagccctacccctgaacctggtgtaggggccggcgaccttcccggaccaacctctgcacctgtgccttcagggagccaatctggaggacggggctcaccggtatccccccggagacaccagaaaggtcttctgaactgtaagatgcctcccgccgagaaggcctcgagaatcagggccgccgaaaaagtatcccgaggggaccaggagtcacccgatgcttgcctgcctccaactgtcccggaggcaccagctcctccacagaaaccgctaaacagtcagagccagaagcacttagccccacctccactcctaagtccactcctccccagcatcaaaccaactgtgcggaagacgagacaagacggctcgcaggaagcccctgaggcgccactgagttccgaactggagcctttccatcccaagcctaagatcaggacccgaaaaagttctagaatgacccctttccctgctacctctgctgctcctaagctagaaccttccacatcgacagatcagccagtcacccccgaacccacttcccaggcaactcggggtcggaccaacaggtcctccgtgaaaacaccagagacagtggtacctaccgcgcccgaactccagccgtctaccagcacagaccagccggtgacgccggagcctacctcccaggccacgaggggacgcacagacagatcgtcagttaaaactcctgaaactgttgttccaacagcgcccgagctgcaggctagtgcctccacagatcagcccgttacttcggagccgacctcaaggaccacacgcggcagaaagaaccggtcttctgtgaagacgcccgagaccgttgtgccggccgctcccgagttgcagcccagcactagtaccgatcagcccgtcacaccggaacctaccagccgagcaacacgcggacgaactaacaggagcagcgtcaaaacaccggaaagcatcgttcctatagcacctgagctgcagccgagcacatcccgaaatcagctcgtcactccagaacccacaagcagggccactcgctgcagaacgaaccgctcgagcgtaaaaacgccagagccggtcgttccgaccgctcctgaaccccatccaacaaccagcacagatcagccagtcacaccaaaactcacttcacgggctactcgacggaaaaccaatagatcctcagtcaaaacgccgaaacctgtcgagcccgccgccagtgatttggaaccattcacacctactgatcagtccgtgacgcctgaggcaattgcccagggcgggcaaagtaaaacccttaggtcatcaaccgtccgggccatgcccgtgccaaccacaccagaatttcagagccccgtgaccacagatcaacccatatccccagagcctataacacaacctagttgtattaagcggcagcgcgccgcaggcaaccccggatcccttgctgcacctattgaccacaaaccgtgttctgcgcctcttgagccaaaatctcaggcttccagaaaccagcgttggggcgcagtgagggcagccgaaagcctgacagctataccagaacccgcatcaccacagctgctggagacaccaatacacgcatcccagatccagaaggttgaaccagctggcagatcgcgattcacacccgagttacagcctaaggcgtcccagtccagaaagaggtccctcgcgaccatggatagcccgccgcaccagaaacaacctcaacgcggagaggtgagtcagaaaactgtgatcattaaagaggaagaagaggacactgctgaaaagccggggaaggaggaggacgtggtcaccccaaaaccgggaaaacgcaagcgggaccaagcagaggaggagcccaataggatccccagccggtctctcaggcgaacgaagctcaaccaagagtccacagccccgaaggtgctctttacaggagtcgtagacgccaggggcgagagagccgtcctggctctgggcggatctctggcgggatctgctgctgaggcttcacatttggtgacagatcgaatcaggaggactgtcaaattcttgtgtgccttgggaaggggcatccctattcttagcctcgactggctgcaccagagcagaaaagcagggtttttcttgccgccggacgagtacgtagtgaccgatcctgagcaggaaaagaatttcggcttttccctgcaagatgccctatctagagcaagggaacgcagattactggaaggttacgaaatatatgtaacccccggggtccagccacctcccccacagatgggagagattatcagctgctgcggtgggacatacctaccaagcatgccccgttcatacaagccacagcgggtggtgatcacttgtccgcaggattttccgcactgctctattcctctgcgggtcggcctcccattgttgagtccggagtttcttctcactggagtgctgaaacaagaggcgaaacccgaagcctttgtgctcagtccactcgaaatgtcaagcacatag

SEQ ID NO: 345709 - DNA, 5409 bp, Artificial Sequence
  derived and/or modified sequence
atggaggacacccaggccatcgactgggatgtggaggaggaggaggagacagagcagagcagcgagagcctgcgctgcaatgtggagcctgtgggccgcctgcacatcttcagcggggcccacggccctgagaaggacttccccctgcacctgggcaagaatgtggtgggccgcatgccagactgcagcgtggccctgcccttccccagcatcagcaagcagcacgccgagattgagatcctggcctgggacaaggcccccatcctgcgggactgtggcagcctgaatggcacccagatcctgcggccccccaaggtgctgagccctggggtgagccaccggctgcgggaccaggagctgatcctgtttgctgacctgctgtgccagtaccaccggctggatgtgtccctgccctttgtgtcccggggccccctgactgtggaggagaccccccgggtgcagggcgagacccagccccagaggctgctgctggccgaggacagcgaggaggaggtggacttcctgtctgagaggaggatggtgaagaagagcaggaccaccagcagcagcgtcatcgtgcctgagagtgatgaggagggccacagccctgtgctgggcggcctgggccccccatttgccttcaacctgaacagcgacacagatgtggaggagggccagcagcctgccacagaggaggccagcagcgctgcccggcggggggccaccgtggaggccaagcagagcgaggccgaggtggtgacagagatccagctggagaaggaccagcccctggtgaaggagcgggacaatgacaccaaggtgaagagaggagctggaaatggagtggtgcctgctggggtcatcctggagaggagccagcccccaggagaagattctgacacagatgtggatgatgacagcaggcctcctggccggcctgctgaggtgcacctggagcgggcccagcccttcggcttcatcgacagcgacacagatgctgaggaggagcgcatcccagccacccctgtggtgatccccatgaagaagaggaagatcttccacggcgtgggcacccggggccctggggcccctggcctggcccacctgcaggagagccaggccggcagtgacacagatgtggaggagggcaaggccccccaggccgtgcccctggagaagagccaggcctccatggtgatcaacagcgacacagatgatgaggaggaggtgtctgctgccctgaccctggcccacctgaaggagagccagcctgccatctggaacagagatgctgaggaggacatgccccagagggtggtgctgctgcagaggagccagaccaccacagagcgggacagcgacacagatgtggaggaggaggagctgcctgtggagaaccgggaggccgtgctgaaggaccacaccaagatccgggccctggtgcgggcccacagcgagaaggaccagcccccatttggagacagtgatgacagcgtggaggccgacaagagcagccctggcatccacctggagaggagccaggccagcaccaccgtggacatcaacacccaggtggagaaggaggtgcccccaggcagcgccatcatccacatcaagaagcaccaggtgtctgtggagggcaccaaccagacagatgtgaaggctgtgggcggccctgccaagctgctggtggtgtccctggaggaggcctggcccctgcacggggactgtgaaacagatgctgaggagggcaccagcctgacagcctctgtggtggctgatgtgaggaagagccagctgcctgcagaaggagatgctggagctgagtgggccgctgctgtgctgaagcaggagcgggcccacgaggtgggcgcccagggcggcccccctgtggcccaggtggagcaggacctgcccatcagccgggagaacctgacagacctggtggtggacacagacaccctgggggagagcacccagccccagcgggagggcgcccaggtgcccaccggccgggagcgggagcagcacgtgggcggcaccaaggacagcgaggacaactacggggacagcgaggacctggacctgcaggccacccagtgcttcctggagaaccagggcctggaggccgtgcagagcatggaggatgagcccacccaggccttcatgctgaccccaccccaggagctgggccccagccactgcagcttccagaccaccggcaccctggatgagccctgggaggtgctggccacccagcccttctgcctgcgggagagtgaagattctgagacccagccctttgacacccacctggaggcctacggcccctgcctgagccccccccgggccatccctggggaccagcaccctgagagccctgtgcacacagagcccatgggcatccagggccggggccggcagacagtggacaaggtgatgggcatccccaaggagacagctgagcgggtgggccctgagcggggccccctggagcgggagacagagaagctgctgcctgagcggcagacagatgtgactggagaggaggagctgaccaagggcaagcaggaccgggagcagaagcagctgctggcccgggacacccagaggcaggagagtgacaagaatggagagagcgccagccctgagcgggaccgggagagcctgaaggtggagattgagaccagcgaggagatccaggagaagcaggtgcagaagcagaccctgcccagcaaggcctttgagcgggaggtggagaggcctgtggccaacagagaatgtgaccctgctgagctggaggagaaggtgcccaaggtgatcctggagcgggacacccagagaggagagcctgagggcggcagccaggaccagaagggccaggccagcagccccaccccagagcccggggtgggcgctggggacctgcccggccccaccagcgcccctgtgcccagcggcagccagagcggcggccggggcagccctgtgagcccccggcggcaccagaagggcctgctgaactgcaagatgcccccagctgagaaggccagccgcatccgggctgctgagaaggtgtccagaggagaccaggagagcccagatgcctgcctgcccccaacagtgcctgaggccccagccccaccccagaagcccctgaacagccagagccagaagcacctggcccccccacccctgctgagccccctgctgcccagcatcaagcccaccgtgaggaagacccggcaggacggcagccaggaggcccctgaggcccccctgagcagcgagctggagcccttccaccccaagcccaagatccgcaccaggaagagcagcaggatgacccccttccctgccaccagcgctgcccccaagctggagcccagcaccagcacagaccagcctgtgaccccagagcccaccagccaggccacccggggccgcaccaacagaagctctgtgaagaccccagagaccgtggtgcccacagcccctgagctgcagcccagcaccagcacagaccagcctgtgaccccagagcccaccagccaggccacccggggccgcacagacaggagctctgtgaagaccccagagaccgtggtgcccacagcccctgagctgcaggccagcgccagcacagaccagcctgtgaccagcgagcccaccagcaggaccacccggggcaggaagaacagaagctctgtgaagaccccagagaccgtggtgcctgctgcccctgagctgcagcccagcaccagcacagaccagcctgtgaccccagagcccaccagccgggccacccggggccgcaccaacagaagctctgtgaagaccccagagagcatcgtgcccatcgcccctgagctgcagcccagcaccagcaggaaccagctggtgaccccagagcccaccagccgggccacccgctgcaggaccaacagaagctctgtgaagaccccagagcctgtggtgcccacagcccctgagccccaccccaccaccagcacagaccagcctgtgacccccaagctgaccagccgggccaccaggaggaagaccaacagaagctctgtgaagacccccaagcctgtggagcctgctgccagtgacctggagcccttcacccccacagaccagagcgtgaccccagaggccatcgcccagggcggccagagcaagaccctgcggagcagcacagtgcgggccatgcctgtgcccaccaccccagagttccagagccctgtgaccacagaccagcccatcagccctgagcccatcacccagcccagctgcatcaagaggcagagagctgctggcaaccctggcagcctggccgcccccatcgaccacaagccctgcagcgcccccctggagcccaagagccaggccagcaggaaccagcgctggggcgctgtgcgggctgctgagagcctgacagccatccctgagcccgccagcccccagctgctggagacccccatccacgccagccagatccagaaggtggagcctgctggccgcagccgcttcaccccagagctgcagcccaaggccagccagagcaggaagaggagcctggccaccatggacagccccccccaccagaagcagccccagagaggagaggtgtcccagaagacagtcatcatcaaggaggaggaggaggacacagctgagaagccaggcaaggaggaggatgtggtgacccccaagccaggcaagaggaagagggaccaggccgaggaggagcccaaccgcatccccagccgcagcctgcggaggaccaagctgaaccaggagagcacagcccccaaggtgctcttcaccggggtggtggatgcccggggggagagagctgtgctggccctgggcggcagcctggccggcagcgctgctgaggccagccacctggtgacagaccgcatcagaagaacagtgaagttcctgtgtgccctgggccggggcatccccatcctgagcctggactggctgcaccagagcaggaaggccggcttcttcctgcccccagatgaatatgtggtgacagatcctgagcaggagaagaactttggcttcagcctgcaggatgccctgagccgggcccgggagcggcggctgctggagggctatgagatctacgtgaccccaggagtgcagcccccaccaccccagatgggagagatcatcagctgctgcggcggcacctacctgcccagcatgcccaggagctacaagccccagagggtggtgatcacctgcccccaggacttcccccactgcagcatccccctgcgggtgggcctgcccctgctgagccctgagttcctgctgactggagtgctgaagcaggaggccaagccagaggcctttgtgctgagccccctggagatgagcagcacctag

SEQ ID NO: 345710 - DNA, 6270 bp, Artificial Sequence
  derived and/or modified sequence
atggaggacacccaggccatcgactgggatgtggaggaggaggaggagacagagcagagcagcgagagcctgcgctgcaatgtggagcctgtgggccgcctgcacatcttcagcggggcccacggccctgagaaggacttccccctgcacctgggcaagaatgtggtgggccgcatgccagactgcagcgtggccctgcccttccccagcatcagcaagcagcacgccgagattgagatcctggcctgggacaaggcccccatcctgcgggactgtggcagcctgaatggcacccagatcctgcggccccccaaggtgctgagccctggggtgagccaccggctgcgggaccaggagctgatcctgtttgctgacctgctgtgccagtaccaccggctggatgtgtccctgccctttgtgtcccggggccccctgactgtggaggagaccccccgggtgcagggcgagacccagccccagaggctgctgctggccgaggacagcgaggaggaggtggacttcctgtctgagaggaggatggtgaagaagagcaggaccaccagcagcagcgtcatcgtgcctgagagtgatgaggagggccacagccctgtgctgggcggcctgggccccccatttgccttcaacctgaacagcgacacagatgtggaggagggccagcagcctgccacagaggaggccagcagcgctgcccggcggggggccaccgtggaggccaagcagagcgaggccgaggtggtgacagagatccagctggagaaggaccagcccctggtgaaggagcgggacaatgacaccaaggtgaagagaggagctggaaatggagtggtgcctgctggggtcatcctggagaggagccagcccccaggagaagattctgacacagatgtggatgatgacagcaggcctcctggccggcctgctgaggtgcacctggagcgggcccagcccttcggcttcatcgacagcgacacagatgctgaggaggagcgcatcccagccacccctgtggtgatccccatgaagaagaggaagatcttccacggcgtgggcacccggggccctggggcccctggcctggcccacctgcaggagagccaggccggcagtgacacagatgtggaggagggcaaggccccccaggccgtgcccctggagaagagccaggcctccatggtgatcaacagcgacacagatgatgaggaggaggtgtctgctgccctgaccctggcccacctgaaggagagccagcctgccatctggaacagagatgctgaggaggacatgccccagagggtggtgctgctgcagaggagccagaccaccacagagcgggacagcgacacagatgtggaggaggaggagctgcctgtggagaaccgggaggccgtgctgaaggaccacaccaagatccgggccctggtgcgggcccacagcgagaaggaccagcccccatttggagacagtgatgacagcgtggaggccgacaagagcagccctggcatccacctggagaggagccaggccagcaccaccgtggacatcaacacccaggtggagaaggaggtgcccccaggcagcgccatcatccacatcaagaagcaccaggtgtctgtggagggcaccaaccagacagatgtgaaggctgtgggcggccctgccaagctgctggtggtgtccctggaggaggcctggcccctgcacggggactgtgaaacagatgctgaggagggcaccagcctgacagcctctgtggtggctgatgtgaggaagagccagctgcctgcagaaggagatgctggagctgagtgggccgctgctgtgctgaagcaggagcgggcccacgaggtgggcgcccagggcggcccccctgtggcccaggtggagcaggacctgcccatcagccgggagaacctgacagacctggtggtggacacagacaccctgggggagagcacccagccccagcgggagggcgcccaggtgcccaccggccgggagcgggagcagcacgtgggcggcaccaaggacagcgaggacaactacggggacagcgaggacctggacctgcaggccacccagtgcttcctggagaaccagggcctggaggccgtgcagagcatggaggatgagcccacccaggccttcatgctgaccccaccccaggagctgggccccagccactgcagcttccagaccaccggcaccctggatgagccctgggaggtgctggccacccagcccttctgcctgcgggagagtgaagattctgagacccagccctttgacacccacctggaggcctacggcccctgcctgagccccccccgggccatccctggggaccagcaccctgagagccctgtgcacacagagcccatgggcatccagggccggggccggcagacagtggacaaggtgatgggcatccccaaggagacagctgagcgggtgggccctgagcggggccccctggagcgggagacagagaagctgctgcctgagcggcagacagatgtgactggagaggaggagctgaccaagggcaagcaggaccgggagcagaagcagctgctggcccgggacacccagaggcaggagagtgacaagaatggagagagcgccagccctgagcgggaccgggagagcctgaaggtggagattgagaccagcgaggagatccaggagaagcaggtgcagaagcagaccctgcccagcaaggcctttgagcgggaggtggagaggcctgtggccaacagagaatgtgaccctgctgagctggaggagaaggtgcccaaggtgatcctggagcgggacacccagagaggagagcctgagggcggcagccaggaccagaagggccaggccagcagccccaccccagagcccggggtgggcgctggggacctgcccggccccaccagcgcccctgtgcccagcggcagccagagcggcggccggggcagccctgtgagcccccggcggcaccagaagggcctgctgaactgcaagatgcccccagctgagaaggccagccgcatccgggctgctgagaaggtgtccagaggagaccaggagagcccagatgcctgcctgcccccaacagtgcctgaggccccagccccaccccagaagcccctgaacagccagagccagaagcacctggcccccccacccctgctgagccccctgctgcccagcatcaagcccaccgtgaggaagacccggcaggacggcagccaggaggcccctgaggcccccctgagcagcgagctggagcccttccaccccaagcccaagatccgcaccaggaagagcagcaggatgacccccttccctgccaccagcgctgcccctgagccccaccccagcaccagcacagcccagcctgtgacccccaagcccaccagccaggccaccaggagcaggaccaacagaagctctgtgaagaccccagagcctgtggtgcccacagcccctgagctgcagcccagcaccagcacagaccagcctgtgaccagcgagcccaccagccaggtgacccggggcaggaagagccgcagctctgtgaagaccccagagaccgtggtgcccacagccctggagctgcagcccagcaccagcacagacaggcctgtgaccagcgagcccaccagccaggccacccggggcaggaagaacagaagctctgtgaagaccccagagcctgtggtgcccacagcccctgagctgcagcccagcaccagcacagaccagcctgtgaccagcgagcccacctaccaggccacccggggcaggaagaacagaagctctgtgaagaccccagagcctgtggtgcccacagcccctgagctgcggcccagcaccagcacagacaggcctgtgacccccaagcccaccagcaggaccaccaggagcaggaccaacatgagctctgtgaagaccccagagaccgtggtgcccacagcccctgagctgcagatcagcaccagcacagaccagcctgtgacccccaagcccaccagcaggaccaccaggagcaggaccaacatgagctctgtgaagaaccctgagagcacagtgcccatcgcccctgagctgccccccagcaccagcacagagcagcctgtgaccccagagcccaccagccgggccacccggggcaggaagaacagaagcagcggcaagaccccagagaccctggtgcccacagcccccaagctggagcccagcaccagcacagaccagcctgtgaccccagagcccaccagccaggccacccggggccgcaccaacagaagctctgtgaagaccccagagaccgtggtgcccacagcccctgagctgcagcccagcaccagcacagaccagcctgtgaccccagagcccaccagccaggccacccggggccgcacagacaggagctctgtgaagaccccagagaccgtggtgcccacagcccctgagctgcaggccagcgccagcacagaccagcctgtgaccagcgagcccaccagcaggaccacccggggcaggaagaacagaagctctgtgaagaccccagagaccgtggtgcctgctgccccagccctgcagcccagcaccagcacagaccagcctgtgaccccagagcccaccagccgggccacccggggccgcaccaacagaagctctgtgaagaccccagagagcatcgtgcccatcgcccctgagctgcagcccagcaccagcaggaaccagctggtgaccccagagcccaccagccgggccacccgctgcaggaccaacagaagctctgtgaagaccccagagcctgtggtgcccacagcccctgagccccaccccaccaccagcacagaccagcctgtgacccccaagctgaccagccgggccaccaggaggaagaccaacagaagctctgtgaagacccccaagcctgtggagcctgctgccagtgacctggagcccttcacccccacagaccagagcgtgaccccagaggccatcgcccagggcggccagagcaagaccctgcggagcagcacagtgcgggccatgcctgtgcccaccaccccagagttccagagccctgtgaccacagaccagcccatcagccctgagcccatcacccagcccagctgcatcaagaggcagagagctgctggcaaccctggcagcctggccgcccccatcgaccacaagccctgcagcgcccccctggagcccaagagccaggccagcaggaaccagcgctggggcgctgtgcgggctgctgagagcctgacagccatccctgagcccgccagcccccagctgctggagacccccatccacgccagccagatccagaaggtggagcccgccggccgcagccgcttcaccccagagctgcagcccaaggccagccagagcaggaagaggagcctggccaccatggacagccccccccaccagaagcagccccagagaggagaggtgtcccagaagacagtcatcatcaaggaggaggaggaggacacagctgagaagccaggcaaggaggaggatgtggtgacccccaagccaggcaagaggaagagggaccaggccgaggaggagcccaaccgcatccccagccgcagcctgcggaggaccaagctgaaccaggagagcacagcccccaaggtgctcttcaccggggtggtggatgcccggggggagagagctgtgctggccctgggcggcagcctggccggcagcgctgctgaggccagccacctggtgacagaccgcatccggaggacagtgaagttcctgtgtgccctgggccggggcatccccatcctgagcctggactggctgcaccagagcaggaaggccggcttcttcctgcccccagatgaatatgtggtgacagatcctgagcaggagaagaactttggcttcagcctgcaggatgccctgagccgggcccgggagcggcggctgctggagggctatgagatctacgtgaccccaggagtgcagcccccaccaccccagatgggagagatcatcagctgctgcggcggcacctacctgcccagcatgcccaggagctacaagccccagagggtggtgatcacctgcccccaggacttcccccactgcagcatccccctgcgggtgggcctgcccctgctgagccctgagttcctgctgactggagtgctgaagcaggaggccaagccagaggcctttgtgctgagccccctggagatgagcagcacctag

SEQ ID NO: 345711 - DNA, 5409 bp, Artificial Sequence
  derived and/or modified sequence
atggaggacacccaggccatcgactgggatgtggaggaggaggaggagacagagcagagcagcgagagcctgcgctgcaatgtggagcctgtgggccgcctgcacatcttcagcggggcccacggccctgagaaggacttccccctgcacctgggcaagaatgtggtgggccgcatgccagactgcagcgtggccctgcccttccccagcatcagcaagcagcacgccgagattgagatcctggcctgggacaaggcccccatcctgcgggactgtggcagcctgaatggcacccagatcctgcggccccccaaggtgctgagccctggggtgagccaccggctgcgggaccaggagctgatcctgtttgctgacctgctgtgccagtaccaccggctggatgtgtccctgccctttgtgtcccggggccccctgactgtggaggagaccccccgggtgcagggcgagacccagccccagaggctgctgctggccgaggacagcgaggaggaggtggacttcctgtctgagaggaggatggtgaagaagagcaggaccaccagcagcagcgtcatcgtgcctgagagtgatgaggagggccacagccctgtgctgggcggcctgggccccccatttgccttcaacctgaacagcgacacagatgtggaggagggccagcagcctgccacagaggaggccagcagcgctgcccggcggggggccaccgtggaggccaagcagagcgaggccgaggtggtgacagagatccagctggagaaggaccagcccctggtgaaggagcgggacaatgacaccaaggtgaagagaggagctggaaatggagtggtgcctgctggggtcatcctggagaggagccagcccccaggagaagattctgacacagatgtggatgatgacagcaggcctcctggccggcctgctgaggtgcacctggagcgggcccagcccttcggcttcatcgacagcgacacagatgctgaggaggagcgcatcccagccacccctgtggtgatccccatgaagaagaggaagatcttccacggcgtgggcacccggggccctggggcccctggcctggcccacctgcaggagagccaggccggcagtgacacagatgtggaggagggcaaggccccccaggccgtgcccctggagaagagccaggcctccatggtgatcaacagcgacacagatgatgaggaggaggtgtctgctgccctgaccctggcccacctgaaggagagccagcctgccatctggaacagagatgctgaggaggacatgccccagagggtggtgctgctgcagaggagccagaccaccacagagcgggacagcgacacagatgtggaggaggaggagctgcctgtggagaaccgggaggccgtgctgaaggaccacaccaagatccgggccctggtgcgggcccacagcgagaaggaccagcccccatttggagacagtgatgacagcgtggaggccgacaagagcagccctggcatccacctggagaggagccaggccagcaccaccgtggacatcaacacccaggtggagaaggaggtgcccccaggcagcgccatcatccacatcaagaagcaccaggtgtctgtggagggcaccaaccagacagatgtgaaggctgtgggcggccctgccaagctgctggtggtgtccctggaggaggcctggcccctgcacggggactgtgaaacagatgctgaggagggcaccagcctgacagcctctgtggtggctgatgtgaggaagagccagctgcctgcagaaggagatgctggagctgagtgggccgctgctgtgctgaagcaggagcgggcccacgaggtgggcgcccagggcggcccccctgtggcccaggtggagcaggacctgcccatcagccgggagaacctgacagacctggtggtggacacagacaccctgggggagagcacccagccccagcgggagggcgcccaggtgcccaccggccgggagcgggagcagcacgtgggcggcaccaaggacagcgaggacaactacggggacagcgaggacctggacctgcaggccacccagtgcttcctggagaaccagggcctggaggccgtgcagagcatggaggatgagcccacccaggccttcatgctgaccccaccccaggagctgggccccagccactgcagcttccagaccaccggcaccctggatgagccctgggaggtgctggccacccagcccttctgcctgcgggagagtgaagattctgagacccagccctttgacacccacctggaggcctacggcccctgcctgagccccccccgggccatccctggggaccagcaccctgagagccctgtgcacacagagcccatgggcatccagggccggggccggcagacagtggacaaggtgatgggcatccccaaggagacagctgagcgggtgggccctgagcggggccccctggagcgggagacagagaagctgctgcctgagcggcagacagatgtgactggagaggaggagctgaccaagggcaagcaggaccgggagcagaagcagctgctggcccgggacacccagaggcaggagagtgacaagaatggagagagcgccagccctgagcgggaccgggagagcctgaaggtggagattgagaccagcgaggagatccaggagaagcaggtgcagaagcagaccctgcccagcaaggcctttgagcgggaggtggagaggcctgtggccaacagagaatgtgaccctgctgagctggaggagaaggtgcccaaggtgatcctggagcgggacacccagagaggagagcctgagggcggcagccaggaccagaagggccaggccagcagccccaccccagagcccggggtgggcgctggggacctgcccggccccaccagcgcccctgtgcccagcggcagccagagcggcggccggggcagccctgtgagcccccggcggcaccagaagggcctgctgaactgcaagatgcccccagctgagaaggccagccgcatccgggctgctgagaaggtgtccagaggagaccaggagagcccagatgcctgcctgcccccaacagtgcctgaggccccagccccaccccagaagcccctgaacagccagagccagaagcacctggcccccccacccctgctgagccccctgctgcccagcatcaagcccaccgtgaggaagacccggcaggacggcagccaggaggcccctgaggcccccctgagcagcgagctggagcccttccaccccaagcccaagatccgcaccaggaagagcagcaggatgacccccttccctgccaccagcgctgcccccaagctggagcccagcaccagcacagaccagcctgtgaccccagagcccaccagccaggccacccggggccgcaccaacagaagctctgtgaagaccccagagaccgtggtgcccacagcccctgagctgcagcccagcaccagcacagaccagcctgtgaccccagagcccaccagccaggccacccggggccgcacagacaggagctctgtgaagaccccagagaccgtggtgcccacagcccctgagctgcaggccagcgccagcacagaccagcctgtgaccagcgagcccaccagcaggaccacccggggcaggaagaacagaagctctgtgaagaccccagagaccgtggtgcctgctgccccagccctgcagcccagcaccagcacagaccagcctgtgaccccagagcccaccagccgggccacccggggccgcaccaacagaagctctgtgaagaccccagagagcatcgtgcccatcgcccctgagctgcagcccagcaccagcaggaaccagctggtgaccccagagcccaccagccgggccacccgctgcaggaccaacagaagctctgtgaagaccccagagcctgtggtgcccacagcccctgagccccaccccaccaccagcacagaccagcctgtgacccccaagctgaccagccgggccaccaggaggaagaccaacagaagctctgtgaagacccccaagcctgtggagcctgctgccagtgacctggagcccttcacccccacagaccagagcgtgaccccagaggccatcgcccagggcggccagagcaagaccctgcggagcagcacagtgcgggccatgcctgtgcccaccaccccagagttccagagccctgtgaccacagaccagcccatcagccctgagcccatcacccagcccagctgcatcaagaggcagagagctgctggcaaccctggcagcctggccgcccccatcgaccacaagccctgcagcgcccccctggagcccaagagccaggccagcaggaaccagcgctggggcgctgtgcgggctgctgagagcctgacagccatccctgagcccgccagcccccagctgctggagacccccatccacgccagccagatccagaaggtggagcctgctggccgcagccgcttcaccccagagctgcagcccaaggccagccagagcaggaagaggagcctggccaccatggacagccccccccaccagaagcagccccagagaggagaggtgtcccagaagacagtcatcatcaaggaggaggaggaggacacagctgagaagccaggcaaggaggaggatgtggtgacccccaagccaggcaagaggaagagggaccaggccgaggaggagcccaaccgcatccccagccgcagcctgcggaggaccaagctgaaccaggagagcacagcccccaaggtgctcttcaccggggtggtggatgcccggggggagagagctgtgctggccctgggcggcagcctggccggcagcgctgctgaggccagccacctggtgacagaccgcatcagaagaacagtgaagttcctgtgtgccctgggccggggcatccccatcctgagcctggactggctgcaccagagcaggaaggccggcttcttcctgcccccagatgaatatgtggtgacagatcctgagcaggagaagaactttggcttcagcctgcaggatgccctgagccgggcccgggagcggcggctgctggagggctatgagatctacgtgaccccaggagtgcagcccccaccaccccagatgggagagatcatcagctgctgcggcggcacctacctgcccagcatgcccaggagctacaagccccagagggtggtgatcacctgcccccaggacttcccccactgcagcatccccctgcgggtgggcctgcccctgctgagccctgagttcctgctgactggagtgctgaagcaggaggccaagccagaggcctttgtgctgagccccctggagatgagcagcacctag

SEQ ID NO: 345712 - DNA, 5409 bp, Artificial Sequence
  derived and/or modified sequence
atggaggacacccaggccatcgactgggacgtggaggaggaggaggagacggagcagtcctcggaatcattgaggtgcaatgtcgaacccgtcggacggttgcatatttttagtggtgcacacgggcccgagaaggattttcccctgcacctgggaaagaatgtagtgggaagaatgcccgattgcagtgtcgctctacccttcccctcgatttccaaacaacacgcagaaatcgagatcctggcctgggacaaagcccccattctccgcgactgcgggagccttaatggaacacagatcctgagacctcccaaggttctgagccccggggtgtcccaccgcttacgtgatcaagaactgatcctgttcgcggatttattgtgccagtaccaccggctagatgtcagcctcccctttgtgtctcgcggcccgctgaccgtggaggagacgccgcgggtccaaggcgaaacacaaccccaacgactgctgttagccgaagattccgaagaagaagtagactttctgtctgagagaagaatggtaaagaaaagccgtactactagttcatccgttatcgtgccagaaagcgacgaggaagggcatagccccgtcctggggggtttaggaccgccatttgcctttaacttgaactccgatactgacgtggaggaaggtcagcagcctgccacagaggaggcttcgtcagccgcccggcggggtgcaactgtggaagcaaagcaatctgaagcggaggtggtgacggagatccagctggagaaagaccagcccctggtgaaagaaagggataatgatactaaggtcaaacggggtgcgggtaatggggtcgttccagctggcgtgatcctagaaagaagtcaaccgccaggggaagacagcgatacagatgtcgatgacgattctcggccccccggacgtccggccgaggttcacctggaaagagcccagccatttggcttcattgactccgacaccgatgccgaagaagaaagaatccctgctacgcccgtggtaatcccaatgaagaagagaaaaatttttcacggcgtcggaactcgtggtcccggtgcccccggtttggcacacttgcaggaatcccaggcagggtccgataccgatgtcgaggagggcaaagctccacaggccgtaccactagaaaaatcccaggcgtccatggtgatcaacagtgacacggacgacgaagaagaggtgtctgcggccttgacgctggcccatctgaaggaatcccagcccgctatctggaatcgggacgctgaagaggatatgcctcagcgagtggtgttgctgcagagatctcaaacaaccaccgaaagagattctgacaccgacgttgaggaagaagaactccccgtggagaatagagaggccgtcctgaaggatcatacaaaaattcgggccttggtaagggcccatagcgaaaaggaccaacccccctttggcgattccgacgactctgtggaagctgataagagctccccaggcatccatctggaaaggagtcaggcgagcactaccgtcgacatcaacacccaagtggagaaagaggtgccccccggctctgccatcatacatatcaagaagcatcaagtttcggtggaaggcacaaaccagaccgatgtgaaggcagtcggggggcccgcaaagctgctagtggtatcactcgaagaggcatggccgctacacggggactgcgaaactgacgctgaggagggcacaagccttactgccagtgtcgtagcggatgtaaggaagtcacagctgcccgctgaaggtgacgcaggtgcagaatgggccgcagctgtcctgaaacaggaacgggcccacgaggtgggcgcccagggtggccccccagtcgcccaggtggagcaggatttgcctatctcccgcgagaaccttacagaccttgtggtggacacagacacacttggagagagtacacagccccaacgcgaaggagcccaggttccaaccggccgggagcgcgaacagcacgtgggcgggaccaaggattccgaagacaattacggagatagcgaggaccttgatttgcaagcaacacaatgctttctggagaatcaaggactggaagcagtgcagagcatggaggatgagccgacacaggcttttatgctcaccccaccacaggagctgggaccctctcactgtagctttcaaacaacaggcaccctagacgagccatgggaggtgctggccactcagcctttttgccttcgcgaaagcgaggatagtgagacccaaccattcgacacacatcttgaggcatacggcccgtgcctctctccaccacgcgcaatcccaggcgatcagcaccccgagtctcctgtgcacactgagcctatgggaattcagggtagggggcggcaaacggttgataaggtgatgggaatcccaaaggagacagcagagagggtcggacctgagcgtggaccactggagcgagaaaccgaaaagcttttaccggagcgccagaccgatgtgacaggtgaggaagagctcacaaagggcaaacaagaccgggagcagaaacaactgctggctagagatactcagcgccaagagagcgacaagaacggcgaaagcgcaagcccagagagagatcgggagagtctaaaggtggaaatcgaaacaagcgaggaaatacaggaaaaacaggtccagaaacagacccttccctccaaagcgttcgaaagagaggtcgaacggcctgtggccaaccgtgagtgcgacccagctgaattggaagaaaaggtccctaaggtgattttggaacgggacacacagaggggagagcccgagggcgggagccaggaccagaaggggcaggctagttcacccaccccagaacctggggttggcgccggagacctcccggggcccaccagcgcgcccgtgccaagtggctcccagagtggaggcagaggaagcccagtgtcaccccggaggcaccaaaaaggcctgctcaattgcaagatgccccctgcggaaaaagcaagccggatccgggcagcggaaaaggtatcccgaggcgaccaggaatcaccagacgcctgtctacctccgacggttccggaagccccagctcccccacagaagccactaaattcccagagtcagaagcatctagctccacctcccctcctgagcccgcttctccccagcatcaaacccaccgtgaggaaaactagacaggacgggtcccaggaggcaccagaggcaccactgagctctgagctcgagcccttccaccccaagccaaaaattaggactagaaaatcaagcaggatgacacctttccctgcaaccagcgccgcacccaagctggagcctagcactagcaccgaccagcctgtgacacctgagcctacttctcaggcgacacgagggcgtactaatcgttccagcgtgaagacacctgagaccgtcgtgcccacggcgcccgaactgcagcctagtacttcaacggaccaacctgtgaccccagagcctacaagccaggcaactcgggggcgaacagacagaagctcagtgaagactcccgaaactgtggtgccaacggctcctgagcttcaggcttctgcttccacagatcagccggtaacgtccgagccaacttcaagaaccacccgtggtcgtaaaaaccggagttctgtgaaaacgcctgagactgtggtcccagcagctcctgagcttcagcctagcacttctaccgatcagccagtgactcccgagcctacgagtagggcaacaaggggaagaacaaataggtcttctgtgaaaacccccgaatctatcgtgcctattgcgccagaactacagccctctacatcaagaaaccagctggtgaccccagaaccgacatcccgggcgacacggtgtcgaactaatagaagctcagttaaaactcctgagcccgtggtccctaccgcccctgagccacatcccactaccagcacagatcagccggtcacccccaaactcacttcccgggcaacacggcgcaagacaaaccgctcctctgtgaaaacacccaagcctgtcgagcctgccgcatcagacctggaacctttcacgcccaccgaccagagtgtgacccctgaggcgatcgctcaggggggccaaagtaaaactcttcgcagtagcaccgttcgcgccatgcccgtcccaaccactccagagttccagtcccccgtgaccaccgatcagcctatttccccagaaccaatcacccagccatcttgcataaaacgtcagagggctgccgggaatcccggctcccttgctgccccaattgaccataagccttgctccgccccgctggaacccaagtcacaggctagtcgcaaccaaagatggggagctgtccgggctgccgagtctttgacagccatacccgagcctgcttcccctcagcttctggagacaccaattcatgcctcacaaatccagaaagtagagcctgccggaagaagccggttcacccccgaactgcagccaaaggcttctcagtcccggaaaaggtcattagccaccatggattcccctccgcaccaaaagcagcctcagaggggggaagtctcccagaagacagttattatcaaggaggaagaggaagacactgctgagaaacccgggaaagaagaggacgtggttacaccaaagcccgggaagcggaaaagagatcaggccgaagaggagccgaaccggattccttcccgcagtctaagaagaacaaaacttaatcaggagtccaccgctcctaaggttctcttcacaggtgtggtggacgcacgcggagagagagctgtgctagcactggggggatctctggctggctcggctgccgaggcctcccatttggtcactgacagaatccgccggacagtaaagttcctctgtgcactgggccgtggcattccaatccttagcctggactggcttcatcagtccaggaaggccggcttttttctccctcctgacgagtatgttgtgaccgatccagagcaggaaaaaaacttcggattcagccttcaagacgccctctcccgagcaagagaacgcaggttattagagggttatgagatatatgtcactccgggcgtgcaacctcctccgccgcaaatgggcgagatcatctcatgttgcggcggtacctatctcccttctatgccgaggtcttataagccacaaagggtcgtgatcacctgcccacaggacttcccccactgttctatacccctgagggtcgggctgcccctcttatctcccgaatttctgctcaccggcgtcctgaagcaggaggccaagcctgaagcatttgtcttgagcccccttgagatgtctagtacctag

SEQ ID NO: 345713 - DNA, 6270 bp, Artificial Sequence
  derived and/or modified sequence
atggaggacacccaggccatcgactgggacgtggaggaggaggaggagacagaacaatcaagcgaaagtcttaggtgcaacgtggagcccgtcgggagactgcacattttctccggagctcacgggcccgagaaggatttcccgttgcatctgggtaaaaatgtggtgggcaggatgcctgattgctctgtagcgctgcctttccccagtatttcgaaacagcacgctgaaatcgaaattttagcatgggacaaggccccaatcttgcgggactgtggttctctcaacgggacacaaatcctgcgaccccctaaggttctgagccccggagtatctcaccggctgcgcgaccaggagttgatattattcgcggacctgctgtgtcagtaccaccgtctggacgtaagcctgccatttgtgtcgaggggacccctgacagtggaagagacaccaagagtacagggggagactcagcctcagcgcttgctgctcgctgaagattcagaagaggaggtggacttcctgtctgagcggcgaatggtgaaaaagtcccgcactacctccagtagcgtgatcgtgccagagtccgacgaggaaggacacagccctgtgctggggggactgggtccccccttcgcgttcaatttaaattccgacactgatgtagaggagggtcagcaacctgccactgaggaggcctcgtcagctgccagacgaggcgccaccgtagaagcaaagcagagcgaggccgaggttgtaaccgagattcaactcgaaaaggaccagccacttgtgaaagagcgggataacgataccaaagtcaagcgaggggctgggaacggtgttgtcccagctggagttatccttgaaagaagtcagcctcctggggaagattccgacacagatgtggatgatgacagccggcccccgggcaggccagctgaggtgcacctcgaaagagctcagcccttcggctttatagatagtgacaccgacgcagaagaagagagaatcccagctactcctgttgtgattcctatgaagaagaggaaaatatttcacggcgtgggtacaagagggcctggagcacccggcttggctcatctgcaggagagtcaggcaggttctgataccgatgttgaagagggcaaggcaccccaggctgtcccactggagaaaagtcaggcttcgatggttatcaactccgatacagacgacgaagaggaagttagcgcagccttgaccttggcccatctgaaggagtcacagcccgccatttggaacagagacgcagaggaagatatgccgcagcgggtggtcttactgcagcgcagccagaccacgactgaaagggacagcgatacagacgtggaggaggaggaactccctgtggaaaacagagaggcagttttaaaagatcacacaaagattcgtgcccttgtccgcgcccattctgagaaggatcagcctcctttcggagacagcgacgatagcgtggaggcagacaagtcttctccaggaattcatttagaacgaagccaggccagcacgaccgtagatattaacacccaggtagagaaagaagtgccaccagggtcggctatcattcatattaaaaaacaccaagtgtctgtggaaggaacaaaccagaccgatgtgaaagccgtgggtgggcctgcgaagttgctggtggtgtcgctcgaagaggcatggcccttgcatggtgactgtgagaccgatgccgaggagggcacttcgctgacggctagcgttgtggccgatgtgaggaagagccaattgcccgctgaaggtgatgcaggagccgaatgggccgctgctgtgctgaagcaggaacgagcccacgaggttggcgcacaaggcgggccaccggtcgcacaggtagaacaggacctcccaatctccagggaaaatcttaccgatttggttgtcgatacggataccttaggagaatctacgcagcctcagcgcgaaggagcccaggtcccgactggaagagagcgggagcagcatgtcggcggaactaaagactctgaagacaattacggcgatagtgaggatctcgacctacaggcgactcagtgtttcctcgaaaatcaagggctcgaggccgtccaatcaatggaggacgaacctacgcaagcattcatgcttacccccccacaggagcttggaccttcacactgcagctttcagaccactggtactctcgatgaaccctgggaggtgctcgccacgcagcctttttgtttaagggaatctgaggactccgagacgcagccatttgatacacatctggaggcgtatggtccatgcctgtccccacccagggccatccccggcgaccaacacccagaatccccagtgcataccgagcccatgggaatccagggacggggtcgacagaccgtggataaagtgatgggaattccaaaagaaactgccgagagagtaggtcctgagcgcggccctctggagcgggaaaccgagaaattgctaccagagcgacaaaccgacgtgaccggtgaagaggagctgactaagggcaaacaggatagagagcaaaagcagctgttagcacgcgatacacaaaggcaagaatcagacaagaatggcgagagcgcctctcctgagcgagatcgtgaatctctgaaagtcgaaatcgagacatctgaagagattcaggagaagcaagtgcagaagcaaactctcccttctaaagcgtttgaacgtgaagttgaaaggcccgtggccaatcgcgaatgcgatcccgcagagctagaggaaaaagttcctaaggtcatcctggaacgcgacacccaacgcggcgagccagagggaggatctcaggaccagaaggggcaggcctcaagcccaacccctgagcctggagtgggggcgggcgacctgcctgggcctacctccgcacctgtcccttcagggtcccaaagcggcggtcgcggatcacctgtttctcctcggaggcaccagaagggcctgcttaattgtaagatgccccccgccgaaaaagcctcccgtattagggcagctgagaaggtcagcaggggtgatcaggaatcccccgacgcgtgtctcccacctactgttcctgaagctcctgccccacctcagaagcccctgaactcacagagccagaaacaccttgccccacctccactgttatccccattattacctagtatcaaaccaaccgtgcggaaaaccagacaggatggatcccaggaggctccagaagcgccattatcaagtgaactggagccatttcatcccaagcccaagattcgcacccgtaaaagtagtcgcatgacacctttccccgctacatccgccgcaccagagcctcatccatcaaccagcacggcccagccggtcacccccaaacctacctcccaggcaacgcggtccaggactaaccgatcctcggtgaaaacacccgaaccagttgtgccgaccgctcctgaactccaaccttctaccagtaccgaccagcccgtgactagtgaacccacaagccaggtgacccgagggagaaagagtcggagcagcgttaagacccctgagaccgtcgtgcccacagctctggagctgcagccttctacctctacagaccggcccgtgacaagtgaacctacctcccaggcgacaagggggagaaaaaataggtcatcggtcaagacaccagagcccgttgttccaacagccccagaattacagcccagcaccagcaccgaccagcccgtgacatcagagcccacgtaccaggccacccggggccgtaaaaacagaagttctgtgaaaacgccagagcccgtggtacccacagccccagagctacggccttctacaagcaccgatcggcctgttacccctaaaccaacttcacggacaacaaggagtcgcacgaacatgtcttcggttaaaacccctgaaacagttgttcccacagcacccgaactccagatttctacgagcacagatcagccagtcacccctaagcccacgagcagaactacgcgctctaggacaaacatgtctagcgtgaaaaaccctgaatctacagtccctatcgctcccgaactaccaccctcaacaagtaccgagcagcccgtaactccagagcccacatctcgggctactaggggtagaaaaaaccgaagttcaggaaagaccccagaaaccctcgttccgacggcccctaaactggagccatccacttctactgatcaaccggtgactccagagcccacaagccaagccacacgtgggaggaccaatagatcctcggtcaaaaccccagagacagtcgtgcctactgctccggagctgcagcctagcacatctactgaccagcccgtcacacccgagcccactagccaggccacacgggggaggacggatcggtcttctgttaaaacgccagagaccgttgtccccaccgcccctgagctgcaagcctctgcatcaacggatcagcccgtcaccagcgagccaacttcacgcacaacccgcgggaggaagaatagatcaagcgttaagaccccagagaccgttgtgccggccgcccctgcattgcaacccagtacctcaactgaccagccggtcacccccgagcctaccagtagggccacgcgcgggcgaaccaaccgctcctccgttaagacccccgagagcattgtacctattgcacctgagctgcagcctagcacttctcgcaatcaactcgtcaccccagagcccaccagccgggctacgagatgtcgcactaacaggtcgagcgtaaagacacccgaacccgtcgtcccaacggctccggaacctcaccccaccaccagcactgaccagcctgttacccccaagctgacatctagggcaacccgccggaagacaaaccgcagctcagttaagactcctaaacctgtggaacccgctgcatctgacctcgagcccttcacacctactgaccagagcgttaccccggaggccatcgcccagggcgggcagtccaaaaccctcaggagctccacagttcgagccatgcccgtgcccacaaccccagagttccagtcacctgttaccaccgaccaaccgattagtccggagcccattacccagccatcttgcatcaagaggcagcgcgccgccggcaatccagggagccttgctgctcctatcgatcacaagccatgcagcgctcctctggagccaaagagccaggcttcccgcaatcaacggtggggcgctgtgagggcggcagagagcctcaccgccatccccgagcccgcctcaccccagctgctggaaaccccgatacacgcgtcacaaatccagaaggtggagcctgcagggcggtctcgttttacccctgaattgcagccaaaggcatcccagtcaagaaaacgaagtctggccaccatggacagccctcctcatcaaaagcagccacagcgtggggaagtgtcacaaaagacagtcatcatcaaagaggaggaagaagacaccgcagagaagcctggaaaagaggaggacgtggtgacacctaagccggggaagcggaaaagggaccaggcagaggaagaaccaaaccgtataccttcacggagtcttaggaggacaaagctcaatcaggaaagcaccgctcctaaagttctatttacgggcgtggtggacgcgcgcggggaacgcgctgttctcgcgctgggcgggagtctcgctgggtcagcggccgaagcatcacatctggtgacagaccggatcagacgcaccgttaagtttctgtgtgccttggggcgcgggatcccgatcttaagccttgactggctccatcagtctagaaaggctggattcttcctcccgcccgacgaatatgtggtcaccgacccggagcaagaaaagaatttcggcttttccttgcaggatgcgctgagtcgagcccgagagcgtcgcctgttggaggggtacgagatctacgtcacccctggggtgcagccccccccgccacagatgggagagataatcagctgctgtggcggcacatatctccccagcatgccaaggtcttataagccgcagcgtgtggtgattacttgcccacaggatttcccccattgcagtatcccgctacgcgtaggcttacccctactcagcccagagtttcttctcactggggtcctcaaacaggaagctaagccagaggcattcgtcctgtccccactggagatgtcgagtacctag

SEQ ID NO: 345714 - DNA, 5409 bp, Artificial Sequence
  derived and/or modified sequence
atggaggacacccaggccatcgactgggacgtggaggaggaggaggagaccgagcaaagctcagaatccctgaggtgtaacgtggagccagttggtaggcttcacatattcagtggagctcatggacccgaaaaagatttcccgctacacctgggaaagaatgttgtgggacgcatgcctgattgttccgtggccctgccattcccgtccatctccaaacagcatgccgaaattgagattctcgcttgggacaaggctcctattttgcgggattgcgggtccctcaacggcactcaaatccttagacctcctaaagtcttatccccaggagtgagtcatcgactgagggaccaggagctcatcctgttcgccgacctgctgtgccaatatcaccgcttggacgtgtctttgcctttcgtttcaaggggcccactgactgtggaagagacaccccgtgtccaaggagaaactcagccacagcggttacttctggctgaagactccgaagaggaggtggattttctctcagagagacgcatggtgaagaagagcagaaccacgtcgtcctctgtaatagtccccgaatctgacgaggaaggtcattctcctgttctgggcggcctaggtccgccgttcgcattcaatcttaattctgatactgatgtcgaagagggtcagcagcctgcaacagaggaggctagctccgccgccagaagaggtgccacagttgaggccaagcagagcgaagcggaggtggttactgaaatccagctggagaaggaccaaccactggtcaaagagagagacaatgacacaaaggttaagcgtggtgcgggcaacggggttgttccagccggcgttatcctggagagatcccagccccccggggaggattctgacaccgacgtggacgacgactcccgacctcccgggcgcccagcagaggtccatctcgaacgggcccagccgtttggtttcatagattccgacacagacgctgaggaggagcgcattcccgcaactcccgttgtgattccaatgaaaaaaaggaaaatcttccacggagttggaactaggggcccaggagcccctgggctggcccatttacaggagagtcaggccggtagcgacacagacgttgaagaaggcaaagccccacaggccgtcccactcgagaaaagccaagcgtctatggtgatcaatagcgatacagatgacgaagaggaagtgagcgccgccctgaccttagcccacctgaaagaaagtcagcctgcaatatggaatagggacgcagaggaggatatgccgcagcgggtggtacttttgcaacgctcccagaccacaaccgaaagggactccgataccgatgtggaggaggaggagctgcccgtcgaaaatagggaagccgttttgaaagatcacaccaagatccgggcgctggtcagggcccattcagaaaaggaccagcccccctttggcgatagcgacgattctgtggaggcagacaaatcttctcctggaatacatctcgaaagaagtcaggcttcaacaactgtcgacatcaacacccaggttgaaaaggaggtgccccccggctccgccatcatccacattaaaaaacatcaggtgtctgttgagggcacgaaccagactgacgttaaagccgtggggggacctgctaagctgctggtcgtctctctagaggaggcttggccgctgcatggagattgtgagaccgatgcagaggagggcacaagcttgactgctagcgtggtggcggacgttcggaagtcacagctgcccgctgaaggcgatgctggcgcagaatgggccgccgcagttctgaaacaggaaagggcacacgaagtaggtgcccagggtggcccgcctgtcgcccaagtggagcaggatctaccaatctcacgcgagaacttaaccgacttagtcgtagacaccgacaccttgggcgagagcacacagccgcagcgggagggcgcgcaggttcctaccggtcgggaaagagagcaacacgtgggtggcactaaagactctgaagacaattacggcgacagtgaggatcttgacctgcaggccactcagtgtttcctcgagaaccagggtttggaagccgtgcagagtatggaagacgaacctactcaggccttcatgcttacacctccccaagagcttggaccgtcacactgcagcttccaaaccacaggtacactggacgaaccgtgggaggtcctggcaactcagcctttttgcctgcgagagagcgaagattctgagacccagcccttcgacacccatttggaggcttatgggccctgtctctcaccgccccgtgccatcccaggggaccaacacccagaatctccggtgcacaccgagcctatggggattcagggaaggggacggcagacagtagataaagttatggggattccgaaagagacagctgaacgcgtcgggccggaacgcggaccccttgaaagagaaaccgaaaagctcctgcccgagaggcaaactgatgtgacaggcgaagaagagctgacaaaagggaaacaggatcgtgagcaaaaacagctcctggccagagacacgcagaggcaggaaagcgataagaacggcgagtctgcttctcccgagcgcgacagggagtcactgaaggttgagatcgagactagcgaggaaattcaggaaaagcaggttcagaaacaaaccttgccaagtaaggccttcgaacgcgaagttgagagaccagtggccaatcgggaatgtgaccccgcggaactcgaggagaaggtgccaaaggtgatcctcgaacgcgatacgcagcggggggaacctgaaggggggtcacaggatcagaagggacaggcgagcagtccaacaccagagccaggtgtgggggccggcgacctccctggccctacttccgcaccagtgccgtcagggtcccagtccgggggccgcggttcgccagtcagcccaagacggcatcaaaagggcctgctgaactgcaagatgccccctgccgaaaaggcatctagaatacgagcagctgagaaggtctctagaggtgatcaagaaagcccggatgcatgccttccacctaccgtgcccgaggcccccgctcctcctcagaagccccttaatagccagagccagaaacacttggcccccccgcccttgctttcgcctttgttgcccagcatcaagcctacggttagaaaaacacgtcaagacggctcacaggaggcccccgaggcccccttatcttccgaattggagccctttcaccccaagcctaaaatccgcacacgcaagtcttcgaggatgacaccctttccggctacttccgctgcccctaaactggagccctctaccagtacagatcagcccgttacccctgaacctacctcccaagcgactcgggggcgcacaaaccgtagttctgtgaagaccccggagacggttgttcccacagccccggaactccagccatcgacttctactgaccagcctgtaacccctgaacctaccagtcaagctacccgcggccgtactgataggagcagcgtgaagacacccgaaaccgtggttcctaccgctcctgaacttcaggcaagtgcatctactgatcagccggttaccagcgaaccgaccagccgtacaacacggggaaggaagaacaggagttctgtgaaaacgcctgagacagtggtgcccgccgccccagaactccagcccagtaccagtacagaccagccggttacccctgagcctacttccagggctactagggggcgaacgaacaggtcaagtgtcaaaaccccagaatctatcgtcccaatcgcacccgagctgcagcctagcacttccaggaaccagttagtgaccccagaaccaacttcccgagctacccgatgcaggacgaaccggtccagtgtgaaaactcccgaacccgtggttccaacagcgccggaaccacaccccaccacatcaacagatcagcctgtgacgccaaaactcaccagccgggccacgcgtaggaaaacgaacagatctagcgtgaagacgcctaagcccgtggagcccgccgcatcagacttggagccattcaccccaacggaccagtcggtgacccccgaagcgatagcacagggtggtcagagcaaaacgctccggtcttccacagtcagggcgatgcccgtgccgaccacccctgagttccaaagtccagtgacaacagaccagcccatctctcctgagcccataacacagcccagctgtatcaaaagacagagagccgcagggaacccaggcagcctcgccgctccgatcgaccacaaaccctgctctgcccccctggagcctaagagtcaagctagcagaaatcaacgttggggtgcggtgagggcagccgaatccctcaccgctatcccggaaccagcaagcccccagttgctggagactcctatccacgccagtcagattcaaaaagttgagccggccggtcggtcccgcttcactcctgagcttcagccaaaggcatcccagagcaggaagcgcagcctagcaaccatggactctcctccccatcagaagcagccgcagcggggtgaagtgagtcagaaaaccgtcatcataaaggaggaagaggaagataccgctgaaaagcctggcaaggaggaagacgtcgtcacccccaagccgggaaaaagaaagcgtgaccaggcagaggaggagcccaacagaatccccagtaggtccctccggaggactaagcttaaccaagaaagcaccgccccaaaagtgctattcacaggagtggttgacgctcggggcgaaagggccgtcttagccctcggcgggtctctggcaggctccgccgctgaggcctcccatctcgtgactgatcggatcaggaggacagtgaagttcttatgtgccctcgggcggggcattccaattttaagcctcgattggctccatcagagcagaaaagcaggcttctttctgccacctgacgaatacgtggtcacagacccagaacaagagaaaaacttcggcttctccctgcaagacgccctcagccgggccagggaacgtagacttttggagggttatgagatttacgttactccaggagttcaacctccacctccacagatgggagaaatcatcagttgctgcggggggacatatttaccatccatgccccgatcttacaaaccacagagagtggttatcacatgcccacaggacttcccccactgttctataccactgagggtgggactgccattactatctccggagtttttactgaccggggtcctcaagcaggaggccaaaccagaagctttcgtgctctccccactggagatgagctcaacatag

SEQ ID NO: 345715 - DNA, 5409 bp, Artificial Sequence
  derived and/or modified sequence
atggaggacacccaggccatcgactgggacgtggaggaggaggaggagacagagcagtcttccgagtcactgcgatgcaatgttgagcccgtgggccgactgcacatttttagcggcgcgcacggccctgaaaaagacttccctttgcatttaggaaagaacgtcgtgggtaggatgcctgattgcagcgtggctctgcctttccctagcatcagtaaacagcacgccgagatcgagatactggcctgggacaaagctccaatcctacgcgactgcggctcactgaatggaacccagatcctgagacctcctaaagtgttgagcccgggggtttcacacagactccgagatcaagagttaatcctttttgccgatctgctgtgtcagtaccacagacttgatgtgtcactcccctttgtctcgcgcgggcctctaacagtcgaagagacacctagggtgcaaggagagacacagccccaacgactcttgctcgctgaggattcagaggaagaggtggacttcctcagcgagaggcgtatggtaaagaagtctcgcacgacatcctccagtgtgatcgtgccagaatccgatgaggaagggcactcccccgtgcttggtggcctcggtcctcccttcgcattcaacctaaactccgacaccgacgtggaagaaggccagcagccagccactgaagaggcatcttcagctgcccggagaggggccaccgtggaagctaaacagagcgaagcggaggtggtgacagagatccagcttgagaaggaccagcccctggtgaaggaacgtgataatgacacaaaggttaaacgtggggccggcaatggcgtggtcccagccggtgtcatactggagcgcagccagccccctggggaagactccgacactgatgtggatgacgatagtcggccacccggaagaccggctgaagtacatcttgaacgcgcccagcctttcggttttatcgactctgacacagatgcggaggaagaaaggatcccggccactccggtggtgattccaatgaaaaaacgtaagatctttcacggggtgggcactcgaggcccaggcgcaccgggcctggctcaccttcaggagtcacaggcaggctctgacactgacgttgaagagggcaaagccccccaggcagtgcctctggagaagagccaggctagcatggtgatcaatagtgatacagatgacgaggaggaggtcagtgctgctctgacactggcgcatctgaaggagtcccaacctgcgatatggaatagggacgcagaggaagacatgccacagagggtcgttctactccaaagaagtcaaacgaccaccgagcgagacagcgacactgatgtcgaggaagaagaacttccagtagagaacagggaggctgtgctaaaagaccacactaaaatccgcgcccttgtcagggcccacagtgaaaaggaccagccgcccttcggggattccgatgactctgtcgaagctgataaatccagccctgggatccacctggagagatcacaggcttccacgactgttgatatcaatacccaggtggaaaaagaagtgcctcccggcagtgctataatccacataaaaaaacaccaagtctcggttgaggggacgaatcagaccgacgtaaaggccgttggcggtcctgccaagctgctcgtggtctcgctggaggaggcttggccactccatggggactgtgagacagacgcggaggagggtacttcattgactgcttctgtagtggcagatgtgcgcaagtctcagctgcccgccgaaggagacgctggggctgaatgggccgcagccgtgctgaaacaggaaagggcgcatgaggtgggcgcacaaggagggccaccagtggcccaggtggaacaggatcttcctattagccgggaaaatctgacagacttggtagtcgacactgacactctcggcgagtcaactcagccccaacgtgagggcgcacaggtccctacgggaagggaaagggaacagcacgtgggtggcaccaaagatagcgaggacaattatggggatagcgaggacctggaccttcaagccacccagtgttttttggagaaccagggtctggaagcagtgcagtccatggaagatgagcctactcaggccttcatgcttacacccccacaagagctcggcccctcacactgcagtttccagactacaggcactctagacgaaccgtgggaagtcttagccacccagcctttctgtctcagggagagtgaggacagtgaaactcaaccattcgacacccacttagaggcatacggtccctgccttagccctcctcgcgccatacccggcgatcagcaccctgagagcccagttcataccgaacctatgggcatacagggtagaggccgccagaccgtcgacaaggtcatgggcatcccaaaagaaacagccgaacgggtaggccctgaaaggggtccattagaacgggaaacagagaaactgctcccagagcgccagaccgacgtgactggagaggaagaactgacaaaaggtaagcaagatcgcgagcagaagcagcttcttgcccgtgatacccaacggcaagaaagcgataaaaacggcgagtctgcaagcccagagagagacagagagtcgctgaaagtggagattgagacatctgaagagatccaggagaaacaagttcagaagcagaccctgccctcgaaagcctttgaaagagaagtggagcgaccagtagcgaacagagaatgtgatccagcagagctggaagagaaggtcccaaaggtgatcttagaaagggatacacagagaggcgagccagaaggaggctctcaggaccaaaagggacaggcctcatccccaacaccagagcctggggtgggtgcgggcgaccttcctgggcccacgtccgcacctgtgccaagcggaagtcagagtggcggtaggggctcaccagtctcccctagacgccatcaaaagggcctgctgaactgcaaaatgccacctgccgaaaaggctagtcggatccgggctgctgaaaaggttagtagaggcgatcaggaatccccagacgcgtgcctgccacctaccgttccagaagctcccgcaccaccccagaaacctctgaactcacaatcccagaagcaccttgccccaccaccacttttgtcccccttgctgccctcaattaaacctaccgtgcgaaagacacgacaggatggaagtcaggaggctcccgaagcgccgctcagttccgagctcgagcctttccacccaaaaccaaaaatccgcacccgaaagagttcaagaatgacgccctttccggcaacgagcgccgccccaaaattggaacctagcacctcgaccgatcagcccgtgactcctgagcctacctcccaggctacccgtgggcgaacaaaccgcagcagcgttaagacaccagagacagtggtccccactgctccagagcttcagccaagcaccagtaccgaccaaccagtaaccccggaaccgactagccaggcaactcggggcagaacggacagaagttcagtcaaaacccctgagaccgtcgttcccacggcccccgaactgcaggcatcagccagtacggaccaaccagttacctctgagcccacatcgcgtactacacgaggccgcaagaaccgctctagtgttaagacaccggaaaccgttgtgccggccgctccggagctgcagcctagcacctcaacggaccaacccgtcacaccagagcctacaagccgggctacgagaggtcgaacaaaccgatctagcgttaaaacccctgagagtatagtgcctattgctcctgagttgcagccttccacaagccggaaccagctcgtaacacctgaacccacatccagggccactcggtgccgtacaaaccggtcttctgtcaaaacccccgagcctgttgtgcctaccgcaccagaacctcatcctacaacctcaacagaccagcccgttacgccgaagctcacctcccgagccacacggcgtaaaacaaatagaagttccgtcaagacgccaaagccggtggaacccgccgcctctgacctagagccattcacacctaccgaccaatccgtgacccctgaggccattgcacagggcggtcagagtaaaacgctgaggagctccaccgtccgcgccatgcccgtgccaaccacgcctgaattccagagtcccgtcacaacagaccagccgatctctcctgagcctattacgcagccttcttgtataaaacgccagcgggccgcagggaatcctggtagcctcgcagcccctatcgatcataaaccttgcagtgcaccgttggaacctaagagccaggcaagtagaaaccagcggtggggagcggtccgggcagctgaaagcctcacggcaattccagaacctgcctctccgcagctgctggagactccaatccacgcatctcagatacagaaggtcgagccagccgggcggtcccggttcactccggagctgcaaccaaaagccagccagtcccggaagcggtcgctagccacaatggatagtcctcctcaccagaagcagccccagcgaggcgaggtgtcacaaaagaccgtcatcatcaaggaagaagaagaagacaccgccgagaagccaggtaaagaagaggacgtggttactccaaaaccagggaagaggaagcgggatcaggcagaagaggagcccaatcgtatcccgagtagatccctgaggaggactaagctcaaccaggaatcgaccgcacctaaagttctcttcaccggcgtggtcgacgcacgtggagagcgggcagtgctggcgctcggcgggtccctggcaggctcagcggcagaggcttcgcacttggtgaccgaccggattaggagaactgtgaaatttctgtgtgcactgggacggggtatacccatcctttctttggactggcttcaccagtcccgaaaagcagggttcttcctgcctcctgatgagtacgtggtgacagaccctgaacaagagaagaacttcggcttctcactgcaggatgcacttagccgggcaagggaacgaaggctgctcgagggctatgaaatctatgtgactccaggggtgcagcctccaccgcctcaaatgggagagatcattagttgctgtggcgggacttacctgccgtccatgccaagatcatacaagccacagcgtgtcgtgattacgtgtcctcaggacttcccccactgttccatccccttgagggtgggtttaccgttattatcgccagagtttcttttgacaggtgtgctgaaacaggaagctaaacctgaggcctttgttctgtcccctctggaaatgtctagcacgtag

SEQ ID NO: 345716 - DNA, 5409 bp, Artificial Sequence
  derived and/or modified sequence
atggaggacacccaggccatcgactgggacgtggaggaggaggaggaaacagaacagtctagcgaaagtctgcggtgcaacgttgaacctgtaggaaggctgcacatctttagcggagcccacgggccggaaaaagattttccactgcatctgggcaaaaacgtagtcggcaggatgcctgactgcagcgtggctctgcctttccccagtatcagcaaacagcatgccgagattgagatcctggcctgggataaggcaccaatcctacgggactgtggcagcctgaacggcacgcagattttgcggcctcctaaagtactatcgccgggcgtcagtcatcggctccgggaccaggagctgatcctgtttgccgacctgctttgtcagtaccataggctggatgtctcacttccattcgtgtccaggggccctcttacagtggaagagacaccacgggtgcagggggaaacacaaccccaaagattgctattagccgaagattcggaggaggaggtcgactttctgtccgaaagacgaatggtgaaaaagtctcgaaccacctcatcgagcgtgatcgtgcccgagtccgatgaagagggccacagtcccgtacttgggggcttgggtccacccttcgcgttcaaccttaattccgacacagatgttgaggagggccagcagcctgccacggaggaggcgagcagcgctgctaggcgtggagcgaccgtggaagcaaagcagtctgaggccgaggtcgtgaccgagattcagctcgagaaggatcagcccttggtgaaggaacgagacaacgatacaaaagtcaagcggggggcaggtaatggtgtggtacctgctggtgtgatcctggagcgctcacagcctccaggggaagattccgacaccgatgtcgacgacgattccaggcccccaggacggccagcagaggtgcaccttgaaagagcacaacccttcgggtttatcgactccgacaccgacgcagaggaggagcgcatccctgctacacccgtggtgattccgatgaagaagcgcaagatatttcacggagttggaaccagggggcccggcgcaccagggctcgcacacctgcaagagtcacaagcgggcagcgacactgacgttgaggagggcaaagccccccaggcagtgcccctggagaaatcacaggccagcatggtcataaactccgatacggacgacgaggaggaagtttccgccgcactgaccctggctcatcttaaagagagccaacctgcaatctggaaccgcgatgctgaagaagacatgccacagcgcgtcgtcctcttgcagaggtcccagaccaccacggaacgcgactctgacactgatgtggaggaggaggagcttcccgttgagaatagagaagctgtgttgaaagatcacaccaagatccgggcactggtccgcgcccatagcgagaaggatcagcctccttttggcgattccgacgactctgtggaggccgacaagagctcccctggtattcatctagagaggtctcaagccagcacgactgtggatattaacacacaggttgaaaaagaggtgcctccaggttctgccatcatacatattaaaaaacaccaggtgtccgtggagggaaccaatcaaactgatgttaaggctgttgggggacctgccaagcttttggttgttagtctcgaagaagcttggccacttcacggcgactgtgaaacggacgctgaagaggggacatcccttaccgctagcgtcgtggcagatgtgagaaaatctcagctgcccgcagagggagacgccggggctgaatgggccgctgcagtgctcaaacaagaaagagctcacgaggttggtgcacaaggcgggccccccgttgcccaggtggagcaggacctacctatttcccgcgagaatcttaccgacctggtggtcgacacggacaccctgggcgagtccacgcagccgcagcgggagggggcccaggtaccaactggcagagaacgagagcagcacgtaggtggaacaaaagatagcgaggataattatggtgatagcgaggatctggaccttcaggccacccaatgctttcttgaaaatcaaggactggaagctgtgcagagcatggaggatgagcctacacaggccttcatgctcacgccaccacaggagttgggcccatcccactgttcgtttcagactacggggactctcgacgaaccctgggaagtgctcgcgacacagccattctgtctgcgggaaagcgaagactccgaaacgcaaccatttgacacccacctagaagcctacgggccctgtcttagtccaccccgggccattcccggagatcagcatccagaatcccctgtccataccgagccaatgggaatacaagggaggggacgccagactgtagacaaggtgatgggtatccctaaggagaccgcagagagagtgggaccagaacgtggacccctggaacgcgagactgagaagctcttgcctgaaagacagacagacgtcacgggcgaggaggagcttacaaagggaaagcaagaccgggaacagaagcagctgcttgctcgggacacccagaggcaggaatcagataaaaacggcgaaagtgcctcccccgaacgagacagagaaagtcttaaggtggagatagaaacatccgaggagatacaggaaaagcaagtgcagaaacagaccctgcccagcaaagccttcgagagagaggtggagagaccggtagccaatcgagagtgcgaccccgcagaacttgaggagaaggtgccaaaagtcatcctggagcgggacactcagcgcggagagccggagggagggagccaagaccagaaagggcaggccagctctcctactccagagccaggggttggcgcaggggacctccccgggcccacttcagctcctgtgccttcaggatcacagtctggggggagaggatctcctgtgagccctaggcggcaccaaaagggacttcttaactgtaagatgccgcctgccgaaaaagcaagcagaattcgggcagccgagaaggtgagtcgcggagatcaggaatccccagacgcttgccttccaccgactgttccagaggcaccagcccccccacagaaacctctgaactcacaatcccaaaagcaccttgccccacccccgttactgtctcctttacttcctagtatcaaacccacggttcgaaaaacccggcaagatggaagtcaggaagccccagaggctcctctgtccagcgaactagaaccattccatccaaaaccgaaaatccggactaggaagtcctcccggatgacccccttccccgctacctctgctgctcctaagctcgaaccgagcaccagtaccgatcaaccagtaacgcccgagcctacatctcaagcgacaagagggaggaccaacagatcaagcgtgaaaacccctgaaaccgtggtgcccactgcccctgaacttcaacccagcacgtccaccgatcagcccgtgacacctgagccaacatctcaagcgacccgtgggcggaccgacaggtcctctgtgaagaccccagaaaccgtcgtgccaactgcccctgagctccaggccagcgccagtactgaccagccagtgacttccgagccaaccagcaggacgacccggggtcggaaaaatcgtagctccgtgaaaacccccgagacagtggttcctgctgccccggaactgcagccctctacaagcaccgaccaaccagtgaccccagaacccacttcgagggccacccgaggaagaaccaatcggagctcagttaagacacctgaatctatcgttccaattgctcccgagcttcagccttccacatcacggaaccagttggtaacaccagaacccaccagccgggccacacgatgccgcactaatcgttcctccgtcaagactcctgaacccgtcgtgccgacagctcctgagccgcaccctaccacatcaacagaccagccagtcactcctaaactgactagccgagcaacaagacgaaaaactaacaggtcttcagtgaaaactcccaaaccagtggagcccgcagcttctgatttggaaccattcacgcccacagaccagagtgtgacaccagaggcaatcgcacagggaggccaatctaagacactgcgctcgtctactgtgcgcgcgatgcctgtcccaactaccccagagtttcagtctccagttactacagaccagccaatctcacctgagcccatcactcagccaagctgtattaaacgacagcgggcagcaggaaacccgggaagcctggccgcacccattgaccataaaccatgctcagcccctcttgaacccaagtcccaggctagtcgtaatcagcgctggggcgccgtgcgggcagcagagtctctaacggcgatccccgaacccgcctcgccacaactgctggaaactccaatccatgcctcccaaattcagaaggtcgaaccagctggccgtagcaggtttactcccgagctgcagcctaaggctagtcagtctcgaaaaagatccctggcaactatggattccccgcctcaccaaaaacaaccacagcgaggcgaggtttcccagaagacggtgattatcaaagaggaggaagaagacacggctgagaagcccggaaaagaggaggatgtggtcacgccaaaaccaggcaaacggaaacgcgaccaggcggaagaggaacctaataggattccaagccggagcttgagacggacaaagctgaatcaggagtcaacagcgccaaaggtactgttcaccggcgttgttgatgcaagaggtgaacgtgctgtgctggccctgggcggatctctagccggctctgccgcagaggccagtcacctggtgactgaccggatcagaagaaccgtcaagtttctgtgcgcactggggcgcgggatacccatcctgtcacttgactggttacatcagagccgcaaggccgggttcttcctccccccagatgagtacgtggtgacagatccggagcaagagaagaactttggcttctccctgcaagacgcgctgtcccgggcccgcgagcgtcggctgttggagggatacgaaatatacgttacacccggcgtacagccccctcctccacagatgggggaaatcattagctgttgcggaggcacttacctcccatccatgccacggagctataagcctcagcgggtggtgataacatgtcctcaggattttccccactgctccattccactccgtgtgggcctgccgcttctgagcccggaattcttgctcacaggggttctcaaacaggaggccaaacctgaggctttcgtcctgagtcctttggagatgtcgagtacgtag

SEQ ID NO: 345717 - DNA, 5409 bp, Artificial Sequence
  derived and/or modified sequence
atggaggacacccaggccatcgactgggacgtggaggaggaggaggagacggagcagagtagtgagagcctcagatgcaacgtcgagcccgtgggccgtctgcatatcttctcgggcgctcatgggcccgagaaggacttcccactgcacctgggcaagaatgtcgtgggtagaatgcctgactgttccgtcgcactgccattccctagcatctctaagcagcatgcagagatagagattctggcgtgggacaaagccccaatattgcgggattgcggcagcctgaatggcactcagattctgcgcccacccaaggtgctgtctcctggcgtgtctcacaggttgcgcgatcaggaacttattctgttcgcagatctgctgtgccagtaccatcgcttggatgtgtctctgcccttcgtatcgcgagggcctttaacggttgaagagacaccacgcgtccagggagagacccagccacagcgcttattgctggccgaggatagcgaggaggaggtggattttctgtcggaaagaagaatggttaagaaatcacggacgacatcctcatccgtcattgtccctgagtccgatgaggaggggcactctccggttctgggagggctaggaccacccttcgcctttaatctgaactctgataccgatgtggaggaggggcagcagccggccactgaagaagctagcagtgcagcacgcaggggggcgaccgtggaggccaagcagagcgaagctgaggttgtgaccgagatccagctagagaaagatcagccactcgtcaaagagagagataacgataccaaagtaaaaaggggggccggtaatggggtcgtcccagctggcgtcatcctcgagcgatcccagccccctggtgaggactccgataccgacgtggacgatgacagtcgcccacctggtaggcccgcggaggtacatctggagcgcgcccaaccgttcggcttcattgactcggatacagacgctgaagaagaacgcatacctgctactccagtggtgattccaatgaaaaaacgcaaaattttccatggagtgggtactcgcggccctggggcacccggcctggctcacttgcaggagagtcaagcaggaagcgatactgatgtcgaagagggcaaggcgcctcaagcagtaccgctggaaaagtctcaagcctccatggtcattaattcagatacagacgatgaggaagaagtgagcgctgcactgaccctcgcccatctcaaggaaagtcaaccagccatatggaatagggacgcagaggaagatatgccacaaagagtagtgctgctccagcgctcacagaccacgacagaacgggattcagatacagatgtagaagaagaggagctacccgtagaaaaccgagaagctgtgctgaaagaccatacaaagatacgggcccttgtgcgagctcatagtgaaaaagaccaaccacctttcggggacagcgatgatagcgttgaagcagacaaaagcagccctggtatccatcttgagaggtctcaagcaagtactaccgtggatataaatactcaggttgagaaagaggtccctcctgggagcgcaattatccacatcaaaaaacaccaggtatcggtcgaaggaaccaatcagaccgacgtcaaagcagtggggggcccagcaaaattgctggtggtttccctcgaagaagcatggcctcttcacggggattgcgaaaccgatgcagaggagggtacctccctcaccgccagtgtggtcgctgatgtgagaaagagccagctgccagccgagggagatgctggggcggaatgggctgcggccgtgctgaagcaggaacgcgcacatgaagtcggggcacaagggggtccaccagtggcccaggtggagcaggatctgccaataagccgcgagaacctgactgatttggtggtggacacagatacgttaggcgagagtacacagccccagagggagggtgctcaggtacctaccggccgggagagggagcagcatgtcggaggcactaaggatagtgaggataactacggcgattctgaagacctagatcttcaggctacgcaatgtttcctcgaaaatcagggactggaggcggtgcagtctatggaggacgaaccaacacaggcctttatgctaactccacctcaggagttgggccctagtcactgttccttccagacgaccggtacccttgacgagccctgggaggtgctggccacacagcctttctgtctgagagagagtgaagactcagagacgcagccatttgacactcatctcgaggcctatggaccatgcttgagccctccccgcgccataccaggcgatcagcatcctgagtcccccgtccatacagagcctatgggcatccaaggcagaggtcgccagaccgtagataaggtaatggggattcctaaggaaaccgcagagcgcgtagggcccgagaggggcccactggaacgggagactgaaaagctactcccagaaagacagactgacgtgaccggggaagaggagctcactaaaggcaagcaagatcgcgagcagaagcagctgctcgccagagatacccagaggcaggaatccgacaagaacggggagagcgcgagcccagagcgcgatcgggagagcctgaaagtagaaattgagacctccgaggaaattcaggaaaaacaggtccagaagcagacgctgccctcaaaggcttttgagagagaggtcgagagaccggttgctaatagggagtgcgatccagctgagctggaggaaaaagtacccaaagtaatactggaacgcgatacacaaaggggcgaacccgaaggcggcagtcaggaccaaaaaggccaggctagcagcccgacccctgagcctggcgtcggggctggcgacttgcctggtcccacctctgctccagtgccgtctggtagccagtcagggggaagagggtcccccgtgagtccccgccggcaccagaagggcctgctgaattgtaaaatgccaccggctgagaaagcttctcgcatcagagccgccgaaaaggtttcaagaggggaccaggaatcacccgacgcttgccttccacctacagtcccagaggctcccgctccgccgcaaaaaccactgaatagccagagtcagaagcatctggcccctccgccactgttgagcccactgttacccagcattaagcccaccgtccggaaaacacggcaggacggaagccaagaggctcctgaagctcccctgtcttccgagttagagccctttcatccgaaacctaagatcaggactaggaaaagctcgagaatgacccctttccccgccaccagtgccgccccaaaacttgaaccaagtacttcaacagaccagccggtgactcctgaacccacttctcaagccacccgcggacggacaaatagatcttcggtgaagacccccgagacggtggtgcctactgcacctgaactgcagccaagcacctctactgatcagccagtgacacctgagccgacaagccaggcgacgcggggaagaacagatcgaagctctgtaaaaacccccgagactgtggtcccaacagcgccagaactgcaggcttctgccagtactgaccagccagtcacgtctgagcctacgtccaggacaacccgcggtcgtaagaatcgttccagcgtgaagactcccgagaccgtagtacccgcggcacccgccctgcagccttccacgagtaccgaccagccagtcaccccagaaccgacatccagggctaccagagggcgcactaaccgctcctccgttaagactcctgaatcaattgtcccgatagcccctgaactgcagcctagtactagcagaaatcagctggtaacaccagagcctacctccagggccacaaggtgtcgtacgaaccgttcctcagtgaaaaccccggaaccggtagttccaacagctcctgaaccgcacccaacgacaagcacggatcagccggtcacccctaaactcacctccagggctaccaggagaaaaaccaaccgcagttccgtcaagacaccaaaaccagtcgagcccgctgcaagcgacctagaacctttcaccccaaccgatcagtctgtcaccccggaggccatagcccagggcggacagagcaagacactgcgctcctctaccgtccgcgccatgcctgtgccaactactcccgagttccaaagccccgtcacgaccgatcagccaatcagccccgaaccaataacacagccttcgtgcatcaaacggcagagggcggcaggtaatccaggaagtctggctgctcctatcgaccacaaaccttgtagcgcgcccttagagcccaagtcacaagccagtcgaaaccaaagatggggggccgtacgcgcagccgaaagtctcacagcgatcccagaacctgcctcgcctcaactgttagagactccaatccacgctagtcaaattcagaaggtggagccggcagggcggagccgcttcacaccagagctccagcctaaggcctctcagagcaggaaacgtagccttgctaccatggactcacctcctcaccaaaaacagccacaacgcggtgaagtgagccagaaaactgtgataatcaaggaggaggaagaagataccgcggagaaacccggaaaagaagaggatgttgtcacaccaaagccgggaaagaggaagcgcgaccaggccgaggaagaaccaaatagaattcctagccggtccctgcggcggacgaagctgaaccaggagtcaaccgcgccgaaggtgctgttcaccggcgtggtggacgcccgaggtgaacgggcagttcttgcgctcggcggatctctcgcgggcagcgcagcggaggcgagtcacctcgtcactgatcggattcggagaacagttaagtttctttgcgctctcggccgtggcattcccattctgtcattagactggctccatcagtcccgcaaggctggattctttctcccacccgacgaatatgtggttaccgatcctgagcaggaaaagaattttgggtttagtctgcaagacgctttgagccgggcacgagagcgcagactcctggagggctatgaaatctacgtgacccctggagtgcagccacccccaccacagatgggggagataattagttgttgcggggggacgtacctgccttctatgcccaggagttataaaccccagagagtagtcatcacctgtccgcaagatttcccccactgtagtattccactgcgggttggcttacctctactgtcccccgaattcctcctgacaggtgttctcaagcaagaggccaaacctgaggctttcgtcctctccccccttgaaatgtctagtacatag

SEQ ID NO: 345718 - DNA, 5409 bp, Artificial Sequence
  derived and/or modified sequence
atggaggacacccaggccatcgactgggacgtggaggaggaggaggaaaccgagcaaagctccgagtctctgcggtgcaacgtcgagccagtgggtcgcctgcacatatttagtggcgcccacgggcccgagaaggatttccctctgcacctaggcaagaacgtggttggccgaatgcctgactgtagtgtggcccttcctttcccctcaatcagtaagcaacacgcagagatcgagatcttagcctgggacaaggctcccatcttgcgggactgcggctctctaaatggcacgcaaattttaagaccaccaaaagtcctgagccccggtgtaagccacaggctgagagaccaggagctgatcctgttcgctgacctcctttgccagtatcatcggcttgatgtaagtctcccattcgttagccggggcccattaaccgtggaggagaccccgagggtgcagggagagacccagccacagcgcttgttgttggctgaggacagcgaggaagaagtcgacttccttagcgaaagacgcatggtgaagaagtctcgaacgacctcttccagtgtgattgtcccagaatcggacgaggaggggcactccccagtgctgggaggccttggcccaccgtttgccttcaacttgaatagtgacacagatgtggaagaagggcagcagcccgccaccgaagaggctagctccgccgcccgaaggggagctacagtggaagccaagcagtccgaggccgaagtggtcacggagatccagctggagaaggatcagcctcttgtcaaagagagagataatgacacaaaggtcaagaggggcgcggggaatggtgtggttccagctggggtcatcctggaacggtctcaaccccctggagaggactccgatacggacgtggatgatgacagtcgcccacccggtcggccggctgaagtacacctcgaaagggcacaaccatttggctttatcgattccgacaccgacgccgaggaggagcggattcctgctactcctgttgtgatacctatgaaaaaaagaaagatttttcacggggttgggacaagagggcctggggcccccgggctggcccacctgcaagaaagccaggcgggctcagatactgacgtggaagaaggcaaagccccccaggctgttccactggagaagagccaggcttctatggttattaatagcgacacagatgatgaagaggaagtttctgcagccctgacactcgcgcacctgaaggagtcacagcccgctatatggaacagggatgccgaggaagatatgccgcagcgcgtggtcctcctgcagaggtctcaaacgactactgaacgggattccgacaccgatgtggaagaggaagagttgcccgtggagaaccgggaggctgtactcaaggaccacaccaagatccgcgcgctcgttcgggctcactctgagaaggaccaacctccattcggtgacagcgacgacagcgtggaggcagacaaaagctctcccggcatacatctcgaacgttcccaggccagcacaactgtggatatcaatacccaggttgaaaaagaagtgccgcctggaagcgcgattattcatatcaaaaagcaccaggtgtccgtggaggggactaatcaaacagatgtgaaggccgtcggcgggcccgccaagctcctggtggtgagtctggaagaggcgtggcctctgcacggggactgtgaaactgatgctgaagaaggaacgagccttacagcatctgtggtagctgatgtgcgcaaaagccaactgcccgccgagggtgacgctggcgcagagtgggcagccgctgtgttgaaacaggagcgggcccacgaggtcggtgcacagggcgggcctccggtggctcaagtagagcaggatttgccaatttcacgcgagaacctcacagacttagtagtcgacactgatacattaggggaaagtacccaacctcagcgggaaggagcacaggttccaaccgggcgcgaacgcgaacagcacgtaggcggcaccaaagacagcgaagacaattatggtgactctgaagatctggacctgcaggccacacaatgtttcctggaaaatcagggtctcgaggctgtgcagagtatggaagatgagcctacccaggcctttatgctcacgcccccacaggaactgggcccgtcacattgctcattccagacgacagggactctcgacgagccatgggaggtgttggctacacaaccgttctgtttgagggagtcagaggactccgagacacagcccttcgatacgcatctagaagcttacgggccatgccttagcccacctagggctatccctggagaccagcacccagaaagtccagtacacacagagccaatgggcatccagggccggggcaggcagactgtcgataaagtgatgggaattccaaaggaaaccgcagagagagtggggcctgaaaggggccccttggagagagagacagagaaactgttgcctgagaggcaaacagatgtgacgggcgaggaagagcttacgaaaggcaaacaggacagagagcagaagcagctcctcgcacgcgacactcaaagacaagagtccgacaagaatggtgagagcgcttctcccgaaagggacagggaatccctcaaggtcgagatcgaaacgagcgaagaaattcaagaaaagcaggtgcagaaacagacactgccgagcaaagcttttgaacgagaagttgagcgacccgtggcaaacagagagtgcgacccagcggaattggaggaaaaggtccccaaggtgattctagagcgggacactcagaggggagaacccgagggcggctcccaagaccagaagggtcaggcgtcctcaccaacccctgaaccaggtgtgggagccggagatcttcccggtcccacaagcgccccagtgccatctggcagtcagagtggcggaagagggtccccggtctctccacgacgccatcaaaaggggctcctcaactgtaagatgcctcccgccgaaaaagcatccagaatcagggccgcggaaaaggtcagtcgcggggatcaggaaagcccagacgcttgcctgcctccaactgtccccgaagctcccgcccctccacagaagcctctgaacagccaaagtcaaaagcatctggccccgcctccattgctctctccactgctgcccagcattaagcctactgtgagaaagacacggcaagatggcagccaagaggcacccgaagctcctttaagcagtgaactcgaaccatttcaccctaagccaaaaatcaggacccgaaaaagttctcggatgactccctttcccgctacgtcggcagcgcccaagttggagccatcgacatcgacagaccaaccggtgacccccgagcccacgtctcaagctaccaggggccgcacaaacagatccagtgtaaagactcctgagaccgtggtgccaaccgccccagagctccagccaagtacctcaacagaccaacccgtcacccccgaacccactagccaggctacccgaggccgtaccgaccgctcttccgtgaaaacacctgagactgtggttcccacagctccagagctgcaggcctcagcatcaactgatcagcccgttacatccgaacccacatcgcgcacgacacgagggaggaaaaatagatcaagtgtgaaaacccctgagaccgtggtgcctgctgccccagaacttcagccttccacttctacagatcagcctgtgactccagagcccacatcccgggcaacccgaggacggacgaaccggtccagtgtgaaaacacctgaatctattgttccaattgccccagagttgcaaccaagcacctctcgaaatcagttagtgactccagaaccgacaagccgcgcaaccaggtgccgaaccaaccgatccagtgtgaagactcccgagccagtcgtccccacggctcctgaaccacatccgaccacttccactgaccaacctgtgactcctaaactcacaagccgcgctactagacggaagacaaaccgtagcagcgtcaaaacacctaagccagtcgaaccagcagcctccgacctcgagcctttcacccccacagatcaatcagttactcccgaggcaatcgcgcagggaggccagagtaagaccctccggtcaagtacagtccgagcaatgcccgttccaacaactcctgaattccagtcaccagtgactaccgatcagcctatttctcctgaacctatcactcaaccctcatgtatcaagaggcaacgtgccgccggcaatccaggctctttagctgccccaattgatcacaaaccatgcagcgcaccacttgaacctaaatcgcaggcttctcggaatcagaggtggggtgccgtgcgtgccgccgagtccttgaccgcgattccagagccggcctctccgcagctgctggaaacgcccatccatgcatctcagatccaaaaagtggaaccggcaggccgctccaggtttactcccgagcttcagcccaaggccagtcaaagcagaaagagaagcctggctacaatggatagcccaccccaccagaaacagccccagaggggcgaagttagtcaaaagactgtgattattaaggaggaggaggaagatactgccgagaagccagggaaagaggaggatgtggtgacaccaaaacctgggaaaaggaaacgggaccaggccgaggaggagcccaacagaatcccatcccgctcgctcaggcgcacaaagttgaatcaggaatccaccgccccaaaggtcctcttcacaggcgtcgtcgacgcccgcggcgaaagagccgttctcgccctaggaggatccttggcaggcagcgcggccgaagcaagccatctggttacagatagaatccggcgaactgttaaattcctgtgcgcactcggaaggggcattcccatcttgagccttgactggctgcaccaatctcgtaaagccggattctttttgccacctgatgaatacgtggttacagatcctgagcaagaaaaaaacttcggatttagccttcaagatgctctgagtcgtgccagggagagaagactactcgagggctatgagatctatgtcacacccggtgttcaacccccacctccacagatgggagagattatatcttgttgcggcggtacatatctacccagcatgccccggagctacaagccgcagagagtggtgataacctgcccccaggacttcccccattgttccattccactgcgcgtcggcctccccttgttgtctccagagttcctcctgacaggcgtcctgaagcaggaggcgaaaccggaggccttcgtcctgtctcccctcgagatgtcatcaacgtag

SEQ ID NO: 345719 - DNA, 5409 bp, Artificial Sequence
  derived and/or modified sequence
atggaggacacccaggccatcgactgggacgtggaggaggaggaggaaaccgaacaaagtagcgagagcttgagatgcaatgtagaacccgtagggaggcttcatattttcagcggagctcatgggccagaaaaggattttcccttgcacctgggcaaaaatgtggttggtagaatgccagactgtagcgtggctcttccctttccgagcatatccaagcagcatgccgagatcgagatccttgcctgggataaagccccaatcctgagggattgtggctcgctgaacggaacgcaaatcctgaggccccccaaggttttgtcccccggagtgtctcaccgcctaagagatcaggagctgatcctcttcgcagatctgctctgccagtatcatagactagacgtcagccttcctttcgtgtcacgcggtccactaacagtcgaggagactccaagggtgcagggcgagacccagccacaacgcctgcttctagccgaagactcagaagaagaagttgattttctcagtgaaaggcgtatggtgaaaaaatctcggaccacttcctcgtccgtgattgtgccggagagtgacgaggagggtcattcccccgtgctggggggactgggccccccctttgcatttaacctgaactcagataccgacgttgaagaagggcaacagcccgccactgaggaagcatctagcgcagccaggagaggtgccacagtcgaggccaaacaatctgaggctgaagtggtaacagagattcaacttgagaaagatcaacccctggtgaaggagcgagataacgacaccaaggttaaacggggcgctggtaacggcgtggtgcctgccggggtcattctcgaaagaagccagccaccaggagaggacagcgacacagatgtagatgatgattcacggccacccggacgtcctgctgaggtgcacttggagagagcacagcccttcggcttcatcgacagcgacacggacgcagaagaggagagaatccccgccactccagtggtgataccgatgaaaaaacggaagatctttcacggtgtgggcaccagggggccaggagctccagggttagcccacctgcaggagtcccaagcagggagcgacaccgatgtggaggaaggaaaggcgccacaggcagtgcccctcgagaagtcacaggcttcaatggttattaactcagatacggacgatgaagaggaggtctctgcagcattaacgctcgctcacttgaaggagtcccaacccgccatatggaacagagacgctgaggaggacatgcctcaaagagtagtgctgttacagcgctcccaaacaaccacagagagggactccgacactgacgtcgaagaggaggaacttccagttgagaaccgggaagcagtgctgaaagatcacacaaaaatccgagctctggtgagagcccatagcgaaaaggaccagccccctttcggcgattctgatgattcagtggaagctgacaagtccagccccggaatccatttagagcgcagtcaagccagcactaccgtcgacataaatacccaggtggagaaggaggtacccccggggagcgccataatccatattaaaaagcaccaggtttctgtggagggaacaaatcagacagacgtaaaggcagttggtgggcctgccaaactgctagtcgtgtcattggaggaggcctggccccttcacggggattgcgaaactgacgccgaagaagggacatctctgactgccagcgtggtcgctgatgtccggaaatcacagctgcccgctgagggcgacgccggtgctgagtgggccgctgctgttctaaagcaggaaagggcccacgaggtcggtgctcagggcggaccccccgtggcacaggttgagcaggatctgcccatctctcgcgaaaacctcactgatctggtcgtggataccgacacacttggcgaaagtacccagccacaaagagagggagcacaagtgccaacgggccgcgaacgggagcagcacgtcggtggcacgaaagatagtgaggataactacggggatagtgaggacctagatttgcaagccacacagtgcttcttggaaaaccaaggtctggaggctgtacaatcaatggaggacgaaccaactcaggcttttatgctcacacctccacaggaactgggcccgtcccattgttccttccaaaccaccggcactctggatgagccgtgggaagtacttgcaacgcaaccattctgtttgagagagtccgaggacagcgagacacagcccttcgacacacaccttgaggcctacggcccctgcttgtctcccccccgcgctattccaggggatcagcaccctgagtctccagtgcatacagagccaatgggaatccaggggagagggagacagaccgtggacaaagtcatggggattcctaaggaaaccgccgagcgtgtcggaccagagcggggccctctggagcgggaaacagaaaaactgcttccagaaaggcagacagacgtcactggcgaagaagaactcacgaaaggtaaacaggatcgcgaacaaaaacagctcctggctagggacactcagcggcaggaatctgataaaaacggggagtccgccagtccggaacgcgatagggagtctcttaaagtcgaaatagaaacttccgaggagattcaggaaaaacaagtccaaaaacagaccttgccctccaaggcctttgaaagagaggttgagagacctgtcgcgaacagggagtgcgatcccgcagaactggaagagaaggtcccgaaagtgatactggaaagagatacacaaaggggggaacctgagggaggctcacaagatcagaaaggccaggcatcaagtccgacaccagaacccggtgtaggggccggtgatcttcccggcccgacaagcgctccagtgcctagtggaagccagagcggagggaggggcagccctgtcagcccccgaagacatcaaaagggattactcaattgcaagatgccacccgccgaaaaagccagtagaatacgagcggccgagaaggtatcacgcggcgaccaagagtctccggacgcttgtttaccgcctacagtgcccgaggctcccgccccacctcagaagccattaaacagtcaatcacaaaagcacctggccccaccacctctgctgtcgcccctgctcccatcaatcaaacctaccgtcaggaagacgcgacaggacggatcccaagaggccccagaagccccattgagctctgaactcgagccttttcatcctaaaccgaagatcaggacacggaagtccagccgaatgactcccttccccgcaacatcagccgcccctaagcttgagccaagcacaagcacagatcagcccgtgacgcctgagccaaccagccaggctactagaggaagaaccaacagaagctccgtgaagacacctgagactgtcgtgcccaccgcgccagagctacaacccagtacatcaacagatcagcctgtcacgccagagccaacctctcaggccacaagagggagaacggatagaagctccgtgaagaccccggagaccgttgtcccgacagcaccggagctacaggctagtgctagtacagatcagccagtgacaagcgagcctacaagcaggaccaccaggggacggaagaaccgcagtagcgttaaaacccccgaaacagtggtgcctgctgcacctgaactgcagccatctactagcaccgaccaaccagttaccccagagcctacatcacgtgccacaagagggcgcacgaaccggtcaagcgtgaagaccccagagagtatagtacctatcgctcctgaacttcagccctcaacttctagaaatcagctcgttacacccgagcccacttctagagctacccgctgtagaaccaatcggtctagcgtgaagacaccggaaccggtggtccccaccgctcctgagcctcacccaaccacaagtacagatcagcccgtgactcccaaactgacatcccgtgctacccggaggaagactaaccgttcctcagtgaagaccccgaaacccgtcgagccggcagcgtctgaccttgagcccttcactccaacagatcagagcgtgaccccagaggccatagcccagggaggccagtctaagacactccggtcctctactgtgcgagctatgcctgtgccaacaacaccagaattccagagccccgtcactaccgatcagccaatatccccggaacccataacccagccctcctgtatcaagcgacagagagccgctggtaatcctggatctctcgccgcccctatcgaccataagccttgttccgccccattggaaccgaagagccaagcttcaagaaatcagagatggggggcggtgagagctgcagaatcgctgaccgccatccctgagcccgctagccctcagctgctggagactccaatccatgcatcccagatccaaaaggttgaaccagctgggaggtctcgcttcacacctgagctccagccaaaggcgagccagagccgaaagcgcagcttggcgactatggactcaccgccacatcaaaagcagccacaacgcggagaagtatctcaaaagactgtgattataaaggaagaagaggaagatacagccgaaaaacctggaaaggaggaggacgtcgtgaccccaaaaccaggcaaacgtaagcgggaccaagccgaggaagaaccgaatcgcatcccaagccggagcctgcggagaaccaagctgaatcaagagtccaccgcacccaaggtgctgttcaccggggtggtggatgctcggggagagcgagcagtactcgccttaggcgggtccttagcaggatccgccgcggaagcctcacatctcgtgacagacagaatccggagaaccgtgaaattcctttgtgcgctaggcagggggataccgatcctgagtctcgattggttgcaccagtctcgtaaagccggattcttcctgcctccggatgaatacgttgttaccgaccccgagcaggagaaaaattttggattcagcctccaggacgccttgagcagagcccgggagcggagactcttagaggggtatgaaatatatgtcactcctggcgtccaacctccacctccccaaatgggggagatcatcagttgctgcggcggcacttacctgcctagcatgccgaggtcctacaaaccgcagcgggtagtcatcacatgtcctcaggacttcccccactgctctatccctctccgcgtcggcctccccctgttgtctcccgaatttctccttacaggggtgctgaagcaagaagctaaacctgaggcctttgtgctgtctcctttggaaatgagcagtacgtag

SEQ ID NO: 345720 - DNA, 5408 bp, Artificial Sequence
  derived and/or modified sequence
atggaagacacacaggccatcgactgggacgtagaagaagaggaggagactgagcagtcatctgagtccctgcggtgcaatgtcgagcccgtgggacgattacatatcttctcgggcgctcacggacccgaaaaagattttccactgcatctgggcaaaaatgtggtgggcagaatgccagactgctcggtcgccctaccctttccaagcatctccaagcagcacgcagagatcgagattctggcttgggataaagctcctatactgagagactgcggctcactgaacggcacgcagatccttcggccacccaaggtcctttctcctggagtttcgcatagacttagagaccaggagctgattctgtttgccgacctgttatgtcagtaccatcggctcgacgtgagcctccctttcgttagtcggggtccactcacggtggaggaaacgcccagagtgcagggtgagactcagcctcagcgcttgctcctggcagaagattctgaggaggaagtggatttcctcagcgaacgccgtatggttaagaagtcgcgcaccacctctagctctgttatcgtcccagagtctgacgaagaggggcacagtcctgtccttggcggtctggggcctccctttgccttcaacctgaacagcgatacggatgtggaggagggccagcagccagcaactgaggaagccagttctgcagcaagacggggagctactgttgaggccaagcaatccgaagcagaggtagttacagagattcagctggaaaaggaccagcctctggtgaaggaaagggataacgacacgaaagtaaaaaggggggcaggcaatggcgttgtgccagccggagtgatcttggaaaggtctcagccccctggggaagattccgataccgatgtggatgacgactctcgcccacctggaagacccgcagaggttcacttggaaagagcgcagccctttggcttcatcgactccgacacagatgccgaggaggaaaggataccagccacccccgttgttataccaatgaaaaagcgaaaaattttccacggcgtgggcacaaggggtcccggagccccaggtctggcccacctacaggaaagccaagcgggtagcgacacagacgtggaggaagggaaggccccacaggctgtgcccctcgagaagtcacaggcttccatggtgatcaactctgacaccgacgatgaggaggaagtgagcgcagccctgactctggcgcatctgaaagagagccaaccagccatttggaatcgagatgccgaagaggacatgcctcaaagagtggttctgttgcagaggtctcaaaccacaacagagcgggactcagacaccgacgtggaagaagaagagctgccagttgaaaaccgggaagccgttctcaaagatcacacaaaaatccgcgctctggtgcgcgctcatagcgaaaaggatcaaccgccattcggggactctgacgattccgtcgaagcggataagagctccccaggaatccacctggagaggtcacaggcttccacgacagttgatataaacactcaggtagagaaggaagtgccgccaggctctgccatcatccacattaaaaagcaccaggtgagcgtagagggtacgaatcagactgatgtcaaggcggtgggagggcctgctaaactgttagtggtgtccctggaagaagcctggcctctgcatggcgattgcgagaccgacgcagaggaaggcacatctctgaccgctagcgttgtggcggatgtgaggaagtctcagctccctgccgagggcgacgccggagcagaatgggcagctgctgtattgaagcaagagagggcacatgaagtcggagcccagggaggccctccggtggcacaagtggaacaggacctgcctattagccgagagaacctgaccgacttggtggttgacacggatacactgggggagagtacacagcctcagagggagggcgcacaggtccctactggtagagagcgggaacagcacgttggaggcacgaaggatagcgaagataactatggcgacagtgaggatctggacctgcaggccactcagtgtttccttgagaaccagggccttgaggcggtgcaaagtatggaagatgagcctactcaggcctttatgcttactccccctcaggagctcggcccatcccattgcagcttccagacaaccggcacactcgacgaaccttgggaggtgctggccacacagcctttctgccttagggagagcgaagatagcgaaacccagccttttgacacgcacctggaagcttatggaccttgtctcagcccgcctagagcaatcccaggtgaccagcacccggagagtcctgtgcacacagagcctatgggcattcaggggcgtggtcgccaaacggtggacaaagtgatgggtatccctaaagagactgccgaacgagtgggtcccgaaagaggtcctctcgagagggagacagagaagctgctgcccgaaaggcagaccgacgtcactggagaggaggaactgactaaaggaaaacaggaccgggagcagaagcagctgctagcacgggatacacagaggcaggagagcgataaaaatggtgagtccgcgtcccccgagcgtgatcgagaaagcctgaaggtggaaattgaaaccagtgaggagatccaagaaaagcaagtgcagaaacagaccctacccagcaaagccttcgagcgggaagtggagaggccagttgccaaccgggagtgcgatccagcggaactggaggagaaagtgcccaaggttatactggagagagacacacaacgcggagaacccgagggtggcagtcaggaccagaagggtcaggccagcagcccgactcccgaacccggtgtcggtgccggagatctaccgggaccaactagcgccccagtgccctccgggtcccaatccggcggtcgcggttcaccggtaagtccccgacggcatcaaaagggcctgctcaattgcaagatgccccctgcagagaaggctagcaggattagggcggcagagaaggtgtcaaggggcgatcaggagtcacccgacgcctgcctgccacctacggtccctgaagcgcctgcaccaccacagaagccattaaatagtcagagccagaaacatctggccccacctccactcttatctccgctgctgcctagtattaagcccaccgttcggaagaccagacaggacggctcccaggaggctcctgaagcccctctgagcagtgagctagagcctttccatcccaaacctaaaatcagaaccaggaagtcgagcagaatgactccttttcctgcgacctcagcggctccaaagctggagccttccacatctaccgatcagccagttacccctgaacccacatctcaggctacgcgagggcgtacaaaccggagttcagtgaaaactcccgagactgtggtgccaaccgcccctgaactccagccaagcacgagtactgaccagccagtaaccccagaaccgacttctcaggcaacacggggtagaacggatcggagctctgtgaaaacccctgagacggtggttcctacggctcccgaattacaggcctcagcttctactgaccagcctgtcacgtccgaaccgacatccagaactacacgcggacgtaaaaatcggtcaagcgtaaaaactcccgaaactgtagttcctgcagccccagagctccaaccttcaacatccacggatcagcccgtgacgcctgaaccaacctcacgagcaactcggggaagaaccaacagatcatcagtcaagactcccgaatctattgtgcccattgcccctgagcttcagccctccacctcacgcaatcagctggtgacccctgagccgacctctcgtgctacaagatgcaggactaacagaagcagtgttaaaacccccgagcccgtagtgcctaccgctcctgagccgcaccccacaacttcgactgaccaaccagttacacccaaattgacctcccgggctacgagaagaaaaacaaatcggagctcagtgaaaacccccaaacctgtggagcctgcagcctcagacttggaaccttttacgccgactgaccaatctgttacccctgaagcaattgcacaggggggacagtccaagaccttaaggagttccactgtccgggctatgcccgtacctaccactccagaatttcagtcccctgtgaccacagaccaaccaatcagtccagagcctatcacacagccttcttgcatcaagagacagcgagctgccggaaatccgggttcgttagcagctcccatagatcacaaaccatgctccgcccctcttgaacccaagagtcaggcgtcacgcaatcaacgctggggagctgtgcgcgctgccgagtctctgacagcaatccctgaaccagcctcccctcagctccttgagaccccaatccacgcctcccagattcagaaggtggagcctgcgggaaggagccggtttaccccggagctgcagcccaaagcaagtcaaagtcgtaagcgcagtctggctactatggattcccctccacatcagaaacaaccccaacggggagaggtctctcagaaaactgtgataatcaaggaggaggaggaggataccgccgagaagcccggaaaagaggaagatgttgtgacacccaaaccaggcaagaggaaacgcgatcaagcagaggaggagcctaaccggatcccatccaggagccttaggcgcactaaactcaaccaagagagcacagcacccaaggttttatttaccggtgttgtggacgcaagaggagagcgggcagtgctggcgctggggggaagtctagccggatccgccgctgaggcaagccaccttgttaccgatcgaattagacgcactgtgaagtttctttgcgcactgggacggggtatccccatactgtccctggattggttgcatcagtcccgcaaagcgggattctttttgccaccagacgaatacgtggtcaccgatcctgagcaagagaaaaactttggcttttcactgcaagatgccctcagcagggccagggaaaggcgactgctggaaggatatgaaatctacgttacacctggggtgcagcctcccccaccacaaatgggcgagatcattagttgttgtggcggaacatatctccctagcatgcccaggtcttataagcctcagagagtggtgattacctgccctcaagatttccctcactgcagtattcctctacgcgtcggcctgccgcttctgtcccctgaattccttctcaccggggtgctcaaacaggaggctaagccagaagccttcgtgctttcccctctggaaatgtcctcaaccta

SEQ ID NO: 345721 - DNA, 6269 bp, Artificial Sequence
  derived and/or modified sequence
atggaagatactcaggccatagactgggacgttgaagaagaggaagagactgagcagtctagcgaatccctacgttgtaacgtcgagcctgtgggtcggctgcacatcttcagtggtgcccatggtcctgagaaggattttccgctccacctgggaaagaatgtcgttggccgaatgcctgactgctctgtggctctgccatttccctcgatcagcaaacaacatgcggagatcgaaatcctagcatgggacaaagcccctatactgcgggattgcggctctttgaacggaacccagatactgcggccacctaaagttttgagccctggcgtctcccaccgactgcgggatcaagagctcatcctgtttgcagacctcctgtgtcagtaccaccggctggacgtaagtttgccctttgttagtagaggacccctgactgtggaggaaacgcctcgcgtccagggggaaacccaacctcaacgactcctattagcagaggattcggaggaagaggtcgattttctttcagaacgccgtatggtgaagaagtcccgaacgaccagcagttccgttattgttccggaatctgatgaggagggccattcacctgtgcttgggggactggggccaccgttcgcatttaatctgaactccgataccgatgtcgaagaaggtcagcagcccgctactgaggaggcgtccagcgcagcacggcgtggcgcaactgtggaggccaaacaatccgaggctgaggttgtaaccgagatccagctggagaaggaccagccactggtgaaagaacgggacaacgataccaaggtaaagcgcggtgccggtaatggagtggtgcccgcaggggtcatcctggagcggtctcagcctcccggtgaggattctgataccgatgtcgatgacgattcccgcccacccggacggcctgcagaagtgcacctggagagagcccagcccttcgggtttattgacagcgatacagacgccgaggaagagaggatcccagcaacaccagtcgtaatacccatgaagaagcggaagatctttcacggcgtcggcaccagaggacctggagctcccggactcgcccacctgcaggaatcacaggcaggatctgataccgatgttgaggaagggaaagctccacaggcggtgccgctggaaaagagtcaggctagtatggtcatcaactctgacaccgacgatgaagaagaagtgagcgcagctctaacccttgcccacctcaaggaatcgcagcccgcaatttggaacagggatgccgaagaagatatgccgcaacgcgtcgtgttactacaacgttcacagaccaccacagagagagattctgacacagatgtggaggaagaggaacttcctgtggaaaatcgcgaggccgtgttaaaggaccacaccaagataagagcactagtccgcgctcattcagagaaggaccagccaccatttggtgattctgatgactcagtcgaggccgataaaagtagccccggaatccatctcgagaggtcacaggctagcaccacagtggacataaacacacaggtagaaaaggaagtgccgccaggatcggccatcatccacatcaaaaagcaccaggtgtcagttgagggaacaaatcaaaccgacgtgaaggctgtcggaggccctgcgaaactcctggtggtgtccttagaggaggcatggccccttcacggtgactgtgaaactgatgcggaagagggcacatctctcacagccagcgtcgtggctgacgtccggaaatcccagttgcctgcagaaggagacgcaggggctgaatgggctgcagctgtcctgaaacaggaaagagctcatgaagtgggagcccaggggggaccaccagtggcccaagtggagcaggatctccctatttccagagagaacctgactgatctggtggtagatacagatacgcttggcgaatctactcagcctcaaagggagggggcacaggtgcccacaggtagagagagagagcaacacgtgggcggtaccaaggatagtgaggataactacggggacagcgaagatttggatctgcaggcgactcaatgctttctggaaaaccagggattagaagcagtgcagagtatggaagacgagccgacacaggcctttatgctcacccctccacaggagctcggtcctagccactgctcctttcagaccactgggacgctcgacgagccttgggaggtgttggccacacagccattttgcctacgcgagagtgaggactctgagactcagccttttgacactcatcttgaggcttatggtccctgcctgtcccccccacgggctatcccaggggaccagcatccggaaagtcctgtacacactgaacccatgggtattcaagggagaggcaggcagacagtcgacaaagttatgggcatcccaaaagaaaccgctgagcgcgtcggacctgaaaggggacccctcgaacgtgaaacagaaaagttgctaccggaacgccagacggacgttacaggtgaagaggagttaacaaagggtaaacaagaccgcgagcagaagcaactattggcccgtgatacccaacggcaagaaagcgacaagaacggcgagagcgcaagccctgaaagggaccgcgagagtctaaaggtcgagatagaaactagtgaggagattcaggagaagcaggttcaaaaacagaccttaccttctaaagcctttgaacgggaagtggaacgaccggtggctaaccgagagtgtgaccctgccgaacttgaagagaaggtgcctaaggtgatattggagcgggacacgcagaggggagagcctgagggcggatcccaggatcagaaggggcaggctagcagcccgacccctgaaccgggagtcggagccggtgatctgcccggaccaacttccgcccctgtgccgtccggtagtcagtcagggggacgtgggagtcccgtctcgccacggaggcaccaaaaggggctgttaaattgcaagatgccgccagcggaaaaagcctctaggattagggctgctgagaaagtgtctcgcggagaccaggaaagtcctgacgcttgcctcccaccaactgtgcctgaggctcctgctccacctcagaagcctcttaattcccagagtcagaagcatctcgccccacctccccttctttctcctctcctgccttccatcaagcccaccgtcaggaagacccggcaggatggctcccaggaagctcctgaagctccactgagttcggaactcgaacctttccaccccaagcctaaaatcagaacccggaagtcgagcaggatgactccgtttccagccacgtcagctgcgcctgagccgcacccttccacaagcaccgcccagcctgtgacgccgaagccaactagccaggcaacaaggtctcgaacaaacagatcttctgtgaagacgcccgaaccagtggtccccactgccccagagctgcaaccaagtacttctaccgatcagccggtgacgtccgagcctacctcacaggtgactagaggcagaaaatcaagatcttcagtaaaaacccccgaaactgtggtgcctactgccctcgaactccagccatctacctctactgacagacccgtcactagcgagccaacctcccaggctaccaggggcagaaaaaatcgaagttccgttaagacacccgaacccgtggtgcccactgcacccgaactacagccgtctacttcgactgatcagcccgtgactagtgagcccacctatcaggctacgcgcggacgtaaaaataggtctagtgtaaagacccccgagcctgttgtccccactgctcctgagcttaggccttctacctcaaccgatagacctgtcacgcccaagccgacctcacgaaccaccagatctcggaccaacatgtcatccgtgaagaccccagagactgtagtgcctaccgctccggagctgcagatttctacgtccacagaccagccagtgaccccaaaacctacctcccgaaccacgagatcccggacaaatatgagttccgtaaagaatccagaaagtactgtccccatcgcacccgagcttccgccaagcacaagcacagagcagccagtgaccccggaaccaaccagtcgagcgacacggggaaggaaaaacagaagctcaggcaagaccccggaaaccctcgtgcctaccgcgcctaaactggagccaagcacctccactgaccagcccgtaactccggagcctacttctcaagcaactcgaggaagaacaaacaggagtagcgtgaaaacccccgagacggttgttcctacggcacccgaacttcaaccttcaacctcaacggaccagcccgtcacacccgagccgacaagccaggcgactaggggacgcacggaccgctccagcgtaaagaccccggaaacagtcgttcctacagccccagaactgcaggcttcagcctctaccgaccagccagtcacctcagagcccacttcaaggaccacacgaggcagaaagaaccgtagctctgtcaagacccctgagacggtcgtgcccgcagccccagccctacagcccagcacctccacagatcagccagtaacgcccgaacctacatctagagccacccgcggaaggacgaacagaagctccgtgaagactccagagagtatcgtccctattgctcctgaactgcagccttccacaagcaggaatcaactggtgacaccggaacctacttccagggcaacaagatgcagaactaatagaagctccgtaaagacaccagagcccgtggttccaactgcaccagaacctcatccaactacatcgacggatcaaccagtgactcctaagctcacatcccgggctaccagacggaagacaaacaggtcttccgtcaagaccccgaagccagtggaacccgcagcctcagaccttgagccctttacaccaacggatcagtctgtcaccccagaggcgatagcccaggggggacagagcaagacccttcggtcctccacagttagagcgatgcctgttcccactacccccgagtttcaaagcccggtaacgacagaccagccaattagccccgagcctatcacccagcctagttgcatcaagcggcagagggcagccggaaacccaggttcccttgctgccccaatcgaccataagccttgctcagcccctttagagcccaaatcacaagcatccagaaaccagaggtggggcgctgtgagagctgccgaatccctaaccgcaattcctgagcctgcatcaccccagttgctggaaacccctatccatgcttctcagattcagaaagtggaacctgccggaaggtcaaggttcaccccagagcttcagcccaaggcctcacagagtagaaaaagaagtctggcaactatggactctccgcctcaccagaaacagccccagagaggcgaagtgtcgcagaaaaccgtgataatcaaggaagaagaggaagacacagctgaaaaaccaggtaaagaagaggatgtggtcactcctaaacccggtaagaggaagcgggatcaagccgaagaagagccgaatagaatcccgtccaggtctctccggcgtacaaaactgaatcaggagtctaccgccccaaaggtactgtttaccggggtggtggacgcacgtggcgagcgcgctgtccttgctctgggagggtctttggctggatctgcagccgaagcatctcacttggtcacggaccgcattcggagaactgtgaaatttctgtgcgccctgggcagaggcatcccgatcctctctcttgattggctgcatcagtcacgcaaagccggtttttttctgcccccagacgagtacgtggtgaccgatcctgagcaggaaaaaaattttgggttctctctgcaggatgcgttatccagggctcgtgaaaggaggctactggaaggctatgagatatacgttacccctggggttcagcccccaccccctcagatgggagagataatctcttgttgcggcggaacctacctcccatccatgcccagatcatataagcctcagagagtggtgatcacttgtccacaggatttccctcactgctccatccccctgagggtcggtctccctttactttcccccgagttccttctgaccggcgtcctcaaacaggaagctaagcctgaggcctttgttctatcccctttggaaatgtcctcaacata

SEQ ID NO: 345722 - DNA, 5408 bp, Artificial Sequence
  derived and/or modified sequence
atggaggacacccaggccatagactgggacgttgaggaggaagaggaaaccgagcagagctcagagagcctgcgctgcaacgtagagcccgtggggaggcttcacattttttccggcgctcacggcccagagaaggacttcccactccatctggggaaaaatgttgtcggtcggatgcccgattgcagtgtggctctgccattccctagtattagtaaacagcacgctgagattgagattctggcttgggacaaggcccctatcctcagggactgcggatcattgaacggcactcagatcttaaggccccctaaggtgttaagtcccggtgtgagtcaccgcttgcgggaccaggaactgattctgttcgcagatctgctgtgccaataccatagactggatgtcagtctccccttcgtatcacggggaccattaactgtagaggagactccacgagtgcagggcgagacccagcctcagagacttctgttggccgaggactccgaggaggaagtcgacttcctgtccgagcgcaggatggtcaaaaagagcaggaccacatcctcttctgttattgttcccgagagtgatgaggaggggcacagccccgtgctggggggactgggtcccccatttgcctttaatctgaactctgatacagacgttgaggagggtcagcagccagctacggaagaggcctcatccgctgcccgacgcggtgccaccgtggaggcaaagcagagtgaggctgaggtcgttaccgaaatccagcttgagaaggatcagccactggttaaagaacgggataacgatacaaaggtcaaacgcggtgccggtaacggcgttgtacctgcgggagtaatcctggagcggagccaacctccgggagaggatagtgacacagatgtggacgatgattctagacccccaggtaggcctgcagaggttcatttagagagggcgcaacccttcggtttcatagatagtgacactgatgccgaggaagaacgaatccccgctacgcccgtcgtgatacctatgaagaaaaggaagatctttcacggcgtaggcacacgtggccctggagcaccaggcctggctcatcttcaggagagtcaggcgggttcagacactgacgtcgaggagggaaaggcaccccaggcagtaccactggaaaagtcacaggcgtccatggtgatcaacagcgataccgacgacgaagaggaagtgagcgcggcactgaccttagctcacctgaaggaatctcagccggctatttggaatagagacgccgaagaggatatgcctcagcgggtagtgctcttgcagcggagtcagaccactactgagagagattccgacacagacgtcgaagaggaggagttgccagtggagaatcgggaagcagtgctgaaagatcacactaaaatccgagcgcttgtccgtgctcactcagagaaggaccagcccccatttggcgacagtgatgattcggtcgaggccgacaagagttcccctggcattcacctcgaacgcagtcaggccagcactaccgtggacatcaacacacaggtagagaaggaggtccctccagggtcagccatcatccatattaaaaagcaccaggtatcagtagaaggcaccaatcagactgacgtgaaagctgtgggcggtccagctaaactcctcgtggtgtcactcgaggaggcctggcccctgcacggagattgcgagactgacgcggaagaagggacaagtctaaccgcaagcgtggtggccgacgtgagaaaatcccagctgccagcggagggggatgccggagcggaatgggcagctgcggttctgaaacaggaaagggcgcacgaggtaggcgctcagggcggaccacccgtcgctcaggttgagcaggatctgcccatttcccgtgaaaatcttacagacctggtggtagacacagacacattgggcgagtctacgcagccacagagagagggtgctcaggtgcctacaggcagggaacgggagcagcacgtgggagggaccaaggactcagaggataattatggcgattctgaagatttggatctgcaagccacacagtgctttctagagaaccagggcctcgaggctgttcaatccatggaagatgagcctacgcaggccttcatgctgactcctcctcaggaactgggaccgagtcattgctcattccagaccactgggacactggacgaaccgtgggaggtcttggcgacccagccattctgcctgcgggagagcgaagattccgaaactcagcccttcgatacccatctcgaagcttatgggccatgtctgtcgcctccacgagccatccctggcgaccagcaccccgagtcaccagtgcatactgagccgatgggaatccagggacggggtcgccaaaccgtggataaagtgatggggatccccaaggaaacagctgaaagagtgggtcctgagcggggtcctctggaaagagaaaccgagaagctgctcccagaacgccagaccgatgtcactggggaagaagagctcaccaaaggaaagcaggaccgcgaacaaaagcagctgctggcaagggatacccaaaggcaagaatcagataagaacggagagtcagcatctccggagagggatcgtgaatcgctgaaagtcgaaatcgagaccagcgaagagatccaggaaaaacaagtgcagaagcaaactctcccatcaaaggccttcgaacgcgaggtggagcgacctgtggccaatagagagtgcgatccagccgaactggaggagaaggtgcccaaggtcatcctggaacgcgatacccagcgcggagagcctgaaggaggctcacaggatcagaagggccaagcctcctctcccacaccagaaccaggtgttggagctggggatctccctggcccaacttcagctcccgtcccctcgggctcccaatccggcggaaggggctcacctgttagtccacggcgacaccagaaggggctgctcaactgcaaaatgccacctgctgaaaaagcatcccgcataagggcagctgagaaggtatcacgaggggatcaggaatcgcctgacgcatgtctcccaccgactgtgcccgaggcaccagctcccccacagaagccccttaacagtcagtctcagaagcacctcgctccaccaccactgctatcacctctgcttccttcaatcaagcctaccgtaaggaagacccgacaggacggctcccaggaagcccctgaggcaccattgtcctctgagctggagcctttccatcctaagccgaaaattcggactaggaagagtagcagaatgacccccttccccgcaacatccgccgcacctaagttagagccaagtacatccaccgatcagcccgtcaccccagagccgacatcacaagccacacgcggaaggaccaaccggtcttctgttaaaacaccagaaaccgttgtgccgactgccccagagcttcagccaagcactagtactgatcaacccgtgacccccgaacccactagccaggcaactaggggccgaactgaccgcagtagcgtgaagacacctgaaacagtggtgcctacggcccctgagctgcaggcatctgccagcaccgatcagccagtcacatcagagcccacttctagaacaacccggggtagaaaaaacaggtcttccgtgaagactcctgagaccgtagtcccagccgctccagagctccagccctcaacaagcactgaccagcccgtcacacctgaaccaacatctcgtgcaacgcgcggaaggactaatcgaagttctgtgaaaacacccgaatcaatcgtcccaatcgcacccgagctgcagccatccacgagtcggaaccaattggtgacaccagagcccacaagtagagcgacccggtgccgcactaaccgctccagcgtcaagacgccagaaccagtggtacccactgcccctgagccgcatcctaccacatcaacggatcagcccgtcacacctaaactgacatccagggctacacgaagaaagactaatcgttccagtgtgaagacccctaagccagtggagcctgccgcttccgacctcgaaccgttcacaccgacagaccagtccgtaactcctgaagctatcgcccagggcggacagagcaaaacccttagatcctccactgtgcgggcaatgcctgtacccaccacgccagaattccagtccccggttactaccgaccagcccatctcacccgagcccattacacagccttcatgtatcaaacgccagcgagccgcagggaaccccggatctctcgcggctcctatcgaccacaagccctgttctgcccctctggagccaaaaagccaggcttcgaggaatcaacgatggggtgccgtgcgggctgccgaatccctcacagccatccccgaacccgctagcccacaactgctggaaacaccaatccacgccagtcaaatccagaaagttgagcctgctggacgatccagattcactcctgagctccagcctaaagcgtcacagtccaggaaacgaagcctggcaacaatggatagccctcctcaccagaagcagcctcagaggggcgaggtcagccagaagactgtgatcataaaagaggaagaagaagatacggccgaaaagcccggtaaggaagaagacgtggttacgccaaagcccggaaaacgaaaacgggaccaagctgaggaggagccaaatagaatcccttcccgctctctgagacggactaagctgaatcaagagtcaactgcccctaaggtgctcttcacaggcgtcgtggacgctagaggtgaacgcgcagtgctcgcactggggggatctctggccggttccgcggctgaagcgtcacacctggtgacagacaggatacggaggactgtgaagtttctctgtgccctaggtcgcggaattccgatattgtccttggactggctccatcagtctaggaaagccggatttttcctcccacctgacgagtatgttgttacagacccagagcaggagaaaaatttcggcttctctctgcaagatgctctgtcacgagccagagagagacgactgctcgaaggatacgaaatctacgtgactccaggagtgcagcctccacctccccagatgggggaaattatatcctgctgcggcggaacttacctgcccagtatgcctcgctcctataaaccgcaacgagtggttatcacctgccctcaggacttccctcactgttcaattcccctgagagtggggctacccctgctttcgccagagtttctgttgacaggggtgttgaagcaggaggccaaaccggaggccttcgtcctgtccccactggaaatgagctcgacata

SEQ ID NO: 345723 - DNA, 5408 bp, Artificial Sequence
  derived and/or modified sequence
atggaagacacacaggcaattgattgggatgtcgaagaggaggaggagacagagcagagcagcgagtcactgcgatgcaacgtggagcctgtaggcagactgcatatattcagtggtgctcacggccctgagaaggacttcccactgcacctgggaaaaaatgttgtgggcaggatgcccgactgcagcgtggccctccctttccccagcatctcgaagcagcatgctgagatcgaaattctagcttgggacaaggcgcctatcctaagggattgcggcagcctgaatggcacccaaattctacgtcccccaaaagttctatccccaggcgtcagccacaggctgagagaccaagaactcatattgttcgctgacctcttgtgccagtatcacagactcgatgtgagtttaccttttgtctcgaggggacctctcacagtggaggagacccctagggtgcagggcgagacccagccgcagaggctgctgttagccgaggactccgaggaggaagtcgactttctctccgaacggcgtatggtcaagaaatcccgtactacaagtagctctgtgattgttcctgagagtgatgaggagggacatagtcccgtgctcggaggtctgggacctcccttcgctttcaacctcaacagtgacactgacgtcgaggaggggcagcaacctgccacagaggaagccagcagtgctgcaagacggggagccaccgtcgaggccaagcagtcagaggccgaggtggtcaccgagatccagctggagaaggaccagcctctggtaaaggagagggataacgatacgaaggtgaagcggggagccggtaatggagtggtgccggcaggcgtgatcctcgaacggagccagccacccggagaggactcggatacagacgttgacgacgattcgaggcccccaggtcgacccgctgaggtccacctcgagcgcgctcagcccttcgggtttattgactctgatacagacgcggaagaggagaggataccagcaaccccggtcgtgattcctatgaagaagcgcaagattttccacggtgtgggaacaaggggacccggtgctccagggttagcccatttgcaggagtcccaggcaggatccgataccgacgtggaagaaggaaaagcaccgcaagccgttccgcttgagaagagtcaagcaagcatggtcattaactccgatacagacgatgaggaagaagtgtctgcggctctgacgcttgctcatttgaaagagtcacagcccgctatctggaatagagacgccgaggaagacatgccccaacgagtcgtcctcctgcaaagaagccagaccactacagagcgagactctgacaccgacgtggaggaggaggagcttcccgttgagaatagggaggcagtcctgaaagaccacaccaagatcagggctctggtccgtgctcacagtgaaaaggatcagccccctttcggtgattcagacgacagcgttgaggctgataaaagttcaccgggaatacatctcgagcgatcacaggctagcactacagtcgacatcaacacacaggtggaaaaagaggttcctcctggctccgccatcatacatataaaaaagcaccaagtgagtgtcgagggaacaaaccaaaccgacgtgaaggccgtgggcggaccggctaagctcctagtggtgtctctcgaagaggcctggcccctgcacggtgattgcgagacagatgccgaggaggggacctccctgacagcatctgttgtcgctgatgtgcgtaagtcccagctgcctgccgagggtgatgccggtgctgaatgggccgcagcggtcctgaagcaggagcgggcacacgaggtcggggcacagggaggtccccctgtggctcaggtggagcaggatctgccaatctccagggaaaatctgactgacctggtagtggacacagatacactgggcgagagcacccagcctcagcgcgaaggggctcaggtgcccacaggaagggaaagagaacagcacgtcggcggaactaaggactcagaagataactacggggactccgaggacctggatcttcaagcaactcaatgttttctcgagaatcaggggcttgaggccgtgcagtccatggaagacgagccaacccaggcgttcatgctgactcccccacaggaactgggcccaagccactgttctttccagactaccggaacgctggacgagccatgggaggttcttgcgacccagcccttctgcctccgcgaatcagaagattctgagacccagccctttgacacccacctcgaggcctatggcccatgccttagtccaccccgtgccatcccgggagaccagcaccccgagtcgcccgtgcataccgagccaatgggcatacagggccgaggtaggcaaactgtggacaaggtgatgggtattcccaaggagactgcagagcgagtcgggcctgaaagggggccacttgaacgagaaaccgaaaagcttctcccagaacggcagacagatgtgaccggggaagaggagctaacgaagggcaagcaagaccgggaacaaaaacaattactcgctagagatacgcagaggcaagagtcagacaaaaacggggaatctgcttctcccgaacgggatagggaatctctgaaagtcgagatcgagactagcgaggagatacaggaaaagcaagtgcagaagcaaaccttacctagcaaggcattcgagagggaagtggaacgtccggtggcaaaccgcgaatgtgacccggctgaactggaggagaaagtgcccaaagtcatccttgagagggacacacaaaggggagagcccgaaggcggaagtcaagaccagaaggggcaggcctctagtcccacccccgaaccaggtgtcggagctggcgacctgcccggtcccacaagcgctcctgtccccagcgggagccagtccggcggaagaggatcacccgtgtcccctcgaaggcaccaaaaggggctgttaaattgtaaaatgcctcccgctgagaaggcttccagaattagggctgcagagaaggtgtccagaggcgatcaggagtctcccgacgcgtgtctccctccaactgtgcctgaagccccagcgccacctcagaaacctctaaacagccaatcccagaaacacctagcacctccccctttattgagccccctgctgccaagtataaaaccaaccgtccgcaagacgaggcaagatggctctcaggaggcccctgaggcccctctctctagtgagttagagccattccatccgaagccgaagattcggactcgaaagagttccagaatgacaccgtttccagctacatctgctgccccaaagctcgaacccagcacatctaccgaccagccagtcaccccggagccgactagtcaggccacccgtggtcggacgaaccgaagttccgtaaagactccagaaacggtagtgccaaccgctcccgagcttcagccaagtacatctaccgaccagcccgtgacacccgaacctacatcgcaagcaaccagagggagaactgataggtcaagcgttaaaacaccagaaactgtagtccctacagcacccgagctgcaagccagtgcaagcaccgatcaacccgtgacgagcgagcccacctcaaggacgacccggggtagaaaaaaccggtcatctgtgaaaaccccagaaaccgtggtgcctgcggctccggagctgcagccgagcacttccacagaccagcctgtaacgcccgagcccacttcacgggctactagagggaggaccaataggagctcggtcaagacgcccgagtccatcgtgccgatcgctccagagcttcagcctagtactagtcgcaaccaactggtcacaccagaacctacttcccgggctacaagatgtcgcacgaaccgcagctcagtcaaaacacccgaacccgtggtgcccacagccccagagccacatcctacgacctcaaccgatcagcctgtaacacccaagctcaccagccgggcaacaaggcgcaagactaaccggtccagtgttaagactccaaagcccgtggagccagccgctagtgatctggagcctttcacgcctacggatcagtccgttaccccggaggccatcgcccaggggggtcagtccaagactttgaggtcctccaccgttagagcaatgcctgtgcctaccacccctgaattccaatcccccgtcaccacggatcagcctattagtcccgagcctattacacagccatcctgtatcaagcgtcaaagagcggcaggaaacccaggctccctggctgcacccatagatcacaagccgtgtagcgcacccttggagccaaaatcccaggccagtcggaatcagcgctggggcgctgtaagagccgctgaaagtctgaccgccataccagagccagcttcccctcagctgctagagacacctatccacgccagtcaaatacagaaagtagagcctgctggaaggtcacgcttcactccagagcttcagcccaaagcaagccaatccaggaagcgttccctggctaccatggacagtccccctcaccagaaacaaccccagagaggagaagtgtcacagaaaactgtgatcatcaaggaagaggaagaggacaccgccgaaaaacccggtaaggaggaagatgtagtcactcctaagccgggtaagcggaagcgtgatcaggccgaggaagagcccaatagaatacccagcaggtcccttcggcgaacgaagcttaaccaggagtctacagcccctaaagtgctctttacgggtgttgttgatgcccgtggggaacgggctgtgcttgccctaggcggtagcctagcaggatcagccgctgaagcctcccatttggtcactgacaggatccggagaacagtgaaatttttatgtgcactgggacgaggcattccaatcctcagcttggactggctgcaccaatccagaaaagctggcttcttcctcccccctgacgagtacgtcgtaaccgatccagagcaggagaaaaattttgggtttagtctacaggatgcactgagtcgcgcaagggagaggcggttgttggagggctatgagatttacgtcaccccaggagttcagcccccaccgcctcagatgggtgaaatcatatcttgttgcgggggaacctatctcccaagcatgcccaggagctataagcctcaacgggtggtgatcacctgcccccaggacttcccccattgctctatccctctccgcgtgggcttgccgctcttaagtcctgaatttctgcttacaggggtgctgaagcaagaggccaagccagaggcttttgttctgagccccctggaaatgagctctaccta

SEQ ID NO: 345724 - DNA, 5408 bp, Artificial Sequence
  derived and/or modified sequence
atggaggacacacaagccatcgattgggacgtggaggaagaggaggaaactgaacagtctagcgagtctttgcggtgcaacgtggagcccgttggccgtcttcatatttttagcggtgcccacggcccagaaaaggacttccctctgcacctgggcaaaaacgtggtggggaggatgcccgattgttcagttgctcttcctttcccttcaataagcaagcagcatgccgagattgagatccttgcctgggacaaagcaccaatcctgcgagattgtgggtctctgaacgggacgcagattttgcggccaccaaaggtcctttcaccaggcgtgtctcatcgactgagggaccaggaacttattctgtttgcagatttgctttgccagtatcatagactggatgtgtcactgccatttgtcagcagggggccactgaccgttgaggagaccccaagggtccaaggggaaacacaaccacagagactgctgctcgccgaggattcagaggaagaggtagattttttgtccgagcggaggatggtcaaaaaaagccggaccacctctagctctgtgattgtccctgaatccgacgaggaagggcactcacccgtgctgggaggtttggggcctccctttgcctttaatctaaattcagacaccgatgtggaagaaggacagcaacccgctactgaggaagcctctagtgctgcccgacggggagcgacagtggaagctaaacagagtgaggctgaagtggtaacagagattcagctggagaaagaccagcccctggtcaaagaacgcgacaacgatacgaaggtgaaaagaggcgctggtaatggggtggtgcctgccggagtgatactggaacggtcacaaccgccaggcgaggacagcgataccgatgttgacgatgactctcgccctcccggtcggccagcagaagtccatctagagcgagcccagccattcggatttatcgattcagatactgatgccgaagaggagcgcatacctgcaaccccagtcgtgatccccatgaagaaacggaagatctttcatggagtcggtaccagggggccaggagcccctggcctcgctcacctccaagaatctcaggccggaagtgacaccgatgtagaagagggtaaggccccacaggctgtgcccctggaaaagtcacaggcatcaatggtcattaactcagataccgacgatgaggaagaagtcagtgccgctttgaccctcgcacatctcaaggagtcccaacctgctatatggaatcgggatgcggaagaggatatgcctcagagggttgttctcctccagcgctcccagacgacaaccgaacgcgactcggataccgatgtcgaagaggaggaactgccagtggaaaaccgcgaagccgtgctcaaagaccacacaaagatcagagctctcgtgcgtgcacatagtgagaaggaccagccaccttttggggattctgatgactctgtcgaagcagataagtcttcccccggtattcatctggaacgaagccaagcctctacaacagttgacataaatacccaggtggagaaggaggtgcctccaggatccgccattatccatatcaagaaacaccaggtgtcagtcgagggaactaatcaaaccgacgtcaaggcggtggggggaccggcaaagctactcgtggtgagtcttgaagaggcttggcctcttcacggagactgcgaaaccgacgccgaggagggaacgtcccttaccgccagcgtggtcgccgacgttcggaaaagtcagctccctgccgagggagacgcaggcgcagagtgggccgctgctgtacttaagcaggaacgggcacacgaggtaggcgctcaggggggtccacccgtcgcccaggtggagcaggatcttcctattagcagggagaatctcaccgatttagtggtggatacagacactctcggcgaaagcactcagccccaacgcgagggagcccaggtgccaacagggagagagcgcgaacagcacgtgggaggtacaaaggactcagaggacaactatggcgattcagaggacctcgatcttcaggccacccagtgctttttggagaatcaaggattggaggctgtccagtccatggaagacgagccaacgcaagcctttatgctgactccccctcaggagctgggcccaagccattgctcgtttcagaccactgggaccttagatgagccatgggaagttctggcaacccagccattttgcctacgcgagtctgaagacagtgagacccagccatttgacacccatcttgaggcctatggaccttgcctttcaccgccacgtgccatacccggagatcagcaccccgaatctccagtccacacagaacctatgggtatccaaggaagaggacggcaaactgtggataaggtaatgggaatccctaaagaaacagctgaaagagttggacctgaaaggggcccactcgagcgcgagaccgagaagctgctgccagagcggcagactgacgtgaccggagaggaggaattaactaaagggaagcaggatagggagcagaaacaactgcttgccagagatactcagcggcaggagagtgacaaaaatggtgaaagtgcctcccccgagagggaccgggagagtctcaaggtggaaattgaaaccagcgaggagattcaggagaaacaggtgcaaaagcaaacactgcccagcaaggcttttgagagggaggtcgagcggccagtggcgaacagggagtgcgatcctgctgagctggaggagaaggtccctaaagtgattctggaacgcgacacccagcgcggagagcccgagggcggatcccaagatcagaaaggacaggccagctcccctacccccgagccgggtgtaggtgctggggaccttccaggcccaacatcagccccagttccatcagggagccaatctggagggagaggctcacctgtgagtccacgtcggcaccagaaaggtctgcttaattgcaagatgccccctgcagagaaggcctcccggatcagggctgcagaaaaagtgtcgcgcggagatcaggagtcgccagatgcatgcctgcccccaacggttccagaggcccctgcaccaccccagaaacccctgaactcccagagccagaagcacttagctccgccacccctgctttcaccactgttacccagcatcaagcccacagtacgcaagactcgccaggatggttctcaggaagccccagaggcacccctgagctcagaactggaaccgtttcaccccaaaccgaaaattcggaccagaaagagttccaggatgacccctttccctgcaacttcggccgcaccaaagctagagccatccactagtacagaccagcccgtcactcctgagcctacctcccaggcaacccggggacggactaataggtcttctgtgaagaccccagagacagtggtaccaaccgcccctgagctgcagccaagcacgagcacagaccaacccgttacacccgaacccacctcacaggctacaagaggtcggacggacaggtccagtgtgaagaccccagaaacggtggttcctaccgccccagagctccaggccagtgccagtacagaccaacctgtgacaagcgagcctactagccgaactactcggggtagaaaaaacagatcctccgtgaagacacccgagactgttgtacctgcggcaccggagctccagccgagtacttcaactgaccagccagtcacgcccgagccaacctctagagcgactagaggccgaaccaacagatccagcgtgaagacccctgaaagtattgttcctattgctcctgagttacaacccagtacttcaagaaaccagctggttacacccgaacccacctctagagccacacgatgccgaacaaacaggtcatcagtgaagactcccgaacccgtcgttcctacagcccctgagccacaccctaccacctccacagatcagcccgtcaccccaaagttgacttcaagagcgacaagaaggaaaaccaacagatccagcgtgaagacccctaaacccgtcgagcccgctgcgtctgacctggaaccatttacccctaccgaccagtctgtgacccctgaagcaatagcacagggtggccagtcaaaaaccctacggagctccaccgtccgagccatgcccgtacccactacccctgaatttcagtctcccgtcacgaccgaccagccaattagcccagaacctatcacacagccttcgtgcataaagcgacagcgagcagcagggaaccctggatccctggctgccccaattgaccacaagccctgctcagctcctctggagcccaagtcccaggcgtccaggaatcagaggtggggagctgtaagagccgctgaatcgttgaccgctatccctgagccagcctccccccagctgctggagacaccaatacatgcgtcccagatccagaaggtggagcccgcaggacgctcacgcttcaccccagagctgcagcccaaggcatctcagagccgcaaaaggtcattggcaactatggattctcctccccatcagaagcagccacagcgcggagaggtctcacagaaaacggtgatcatcaaggaggaagaggaggacacagccgaaaagccgggaaaggaagaagacgtggtgacccctaaacccggaaagcggaagcgcgatcaggccgaagaagaaccgaaccgaataccgagtagatccctacgccgaacaaaactgaaccaggagtccactgcacctaaggtcctcttcacaggagttgtcgatgctcgcggtgagcgcgctgtgctggcacttggaggcagccttgccggaagcgcggctgaggccagccacctggtgactgaccgcattaggagaaccgttaaattcttatgcgccttgggcagaggcatccccatcctgagcctggactggctgcaccagagccgcaaagcaggttttttccttcctcccgacgagtacgtcgttactgatcccgagcaggagaagaacttcgggttctcactgcaggacgcattaagccgcgctcgagaacggaggcttctggagggatatgagatctacgtgactcctggcgtgcagccacccccacctcagatgggggagatcatctcctgttgtggcggaacataccttccttcaatgcccaggagttacaagccccaaagagtcgtaataacctgtcctcaggactttccccattgttcaatcccgcttcgggtgggtttgcctctgctgtctcccgaattcctgctgacaggcgtcctgaagcaagaagccaagcccgaagcttttgtactgtccccactggaaatgtccagcacgta

SEQ ID NO: 345725 - DNA, 5408 bp, Artificial Sequence
  derived and/or modified sequence
atggaggatacccaggccattgactgggatgtcgaggaagaagaagagacagagcagtcttccgaatctctgaggtgtaatgtcgagcctgtaggacggctgcatatcttttctggggctcacggcccagaaaaggatttcccgctccatttggggaagaatgtggtgggtaggatgccggattgcagcgtggcactgccattccctagtatatcaaaacagcacgcagagatcgaaatcctggcttgggacaaagcaccaatcttaagggattgcggatcactcaacggtacacaaatactgagacctccaaaggtgctcagtcctggcgtttcccataggctccgcgatcaggaactcattctgtttgccgatctcttatgccaataccatcggttggacgtatctcttccatttgtaagcagaggtccactgacagtcgaagagacacccagagtccaaggagaaactcaaccccagaggttgctgcttgccgaagacagcgaagaggaggtagactttctaagcgagagaaggatggtaaagaagagtcggacgactagcagctctgtgatcgtgccagagtccgacgaggaaggccactcccccgttctgggcggattgggcccaccttttgcgttcaacctgaatagcgacacagacgtagaggagggccagcaacctgcaacagaggaggccagcagcgcagcccgaagaggggcaaccgtggaggcaaagcagtccgaggcagaggtcgtgactgagattcagttggaaaaggaccagccccttgtgaaggagagagataacgataccaaggtgaagcgcggtgccggaaacggggtggtcccggctggagtgatccttgaaagaagccagcctcccggagaggattcagatacagatgtggacgacgactcgcgccctcctgggcgtcctgctgaggtccacctggaacgcgcacaaccttttggttttatagactcagatacagatgccgaagaagagcgcattcctgcaactcctgtcgtgattcccatgaaaaagcgcaagatctttcacggggtcggaacaagaggccctggggcacctggtctggctcacttacaagaatcccaggccggttccgacacagatgtggaagaaggtaaggcccctcaggccgtgcctttagagaagtctcaggcttcaatggttattaatagtgatactgatgacgaggaagaggttagtgccgctctaaccctggctcatcttaaagaatcacagcctgccatttggaaccgagatgcagaggaggatatgcctcaaagggtggtgctcctccaaaggtctcagaccacgacagagcgcgatagtgacacggacgttgaagaagaggagctgccggtggagaaccgggaggcagtgcttaaagatcacactaagatccgggcactagtgagggcgcattcagaaaaggaccaaccacctttcggcgatagcgatgattccgttgaagcagacaaaagttcacccggaatacacctggaacggagtcaggcttctactacggtcgacataaacacacaagtagaaaaggaggtccctcctggctctgcaattattcatattaaaaagcaccaggtgtctgtcgagggaacaaaccagaccgacgtcaaggccgtcgggggaccagccaaattgctggtggtctcattggaggaggcttggcccctgcacggtgattgtgagaccgatgctgaggagggcactagtctgactgcatccgtcgtggccgacgtccgcaagagccagctgcctgctgagggtgacgctggagctgaatgggcagctgctgtgctgaagcaggaacgtgcgcatgaggtgggcgcacagggagggcctccggtggcacaagtggagcaggatctccctatttccagagagaatctgaccgacctagtcgtggatacagacacccttggcgaatccacccagccacaaagagaaggagctcaggtgccaacgggtcgggagcgcgaacagcatgtggggggtaccaaagacagtgaggacaattatggcgactctgaagatttggatctacaggccactcagtgctttctcgaaaaccagggactcgaggcggtgcagtcaatggaggacgaaccaacccaggcctttatgcttactcctcctcaggaactggggcctagccattgtagtttccaaacgacaggaaccctagacgaaccttgggaggtcctagctactcagcctttttgtttacgcgagtctgaggatagcgagactcagccttttgacacacatctagaggcctacggcccttgcctgtcgccccctagagccattcctggcgaccagcaccccgagtcaccagtgcacaccgaacctatgggtatccaaggcagagggcgtcagacagtcgataaggtgatgggaatccccaaagagactgcagagcgggtgggccctgagcgtgggccactggagagagaaaccgaaaaactattacccgaaaggcagactgatgtgacaggggaggaagaacttaccaaaggtaagcaggaccgggaacaaaaacagttgttggctcgtgatactcagagacaggagagtgacaagaacggagagagtgcgtcccctgaacgggacagagaatccctgaaagtggaaatcgaaacttccgaggagattcaagaaaagcaagtccaaaagcaaacgttaccttctaaggcatttgagcgggaggtcgaaagacctgtcgccaatagagagtgcgacccagccgagctggaggagaaggttcctaaggtaatacttgagcgcgacacccagagaggggaaccagaggggggatcacaggatcagaaaggccaggcttcatctccgactccggaacctggcgtgggcgctggcgacctgccgggacccacctccgcacccgttccatctggcagccaaagtgggggaagaggctcccccgtgtcccctcggcgtcatcagaaaggcctcttgaattgcaagatgccccctgcagaaaaagcctcccgaattcgggctgcggaaaaagtgagtcgaggggatcaggagtcgcctgatgcctgtttaccaccaacagtccccgaagcgccagcccctccacagaagcccctgaatagccaaagtcaaaagcatctggcgccaccgcctctactcagccctctactcccatcaattaagcccactgtcaggaagacccggcaagatggcagccaggaggcccctgaggctcccctgagtagtgagcttgaacctttccaccccaaacccaagatccgtacacggaagtcctccagaatgacccccttcccagctacctccgcagcaccaaagctggaaccttctacatccaccgaccagcccgtcaccccagaaccgacatcccaagccacaaggggacgaaccaatagaagctctgttaagacaccggagactgtggttcccaccgctccagagttgcaaccttccaccagtactgaccagcctgtcacacccgaaccaacctcacaggccaccagaggtaggacagaccgttcctcagtgaagaccccagagacagtggtccctactgctccagaactccaggcatctgcctctacggaccaaccggtaactagtgagccaactagcagaacaacacgcggtcggaagaatcggagcagtgtcaagacccctgagaccgtagtcccagccgctcctgcgctgcaacccagcacgagtaccgaccagcctgttaccccagaacctaccagcagggcgaccagggggagaactaaccgaagtagcgttaagactcccgagagcatcgtgcccattgcgcctgagcttcaaccatcaaccagtcgaaatcagttggtaacgcctgagcctacgagcagagccactcggtgccggactaaccgcagctcagttaagacaccagaaccggtggtgcccactgcccctgagccacaccccactacctctaccgaccagcccgttacacctaaactcacctcacgagccacaaggcgcaaaaccaatcgatcgtctgtaaagacccccaagcctgtcgagccagctgcctcagatctcgaaccatttactcccaccgatcagagcgtgacaccagaagccatcgcccaagggggtcagagcaaaactctcagaagtagcaccgtgagagcaatgccagttcccaccactccagaatttcagagtcctgttaccacggaccagcctatttctcccgagccgataactcagccttcgtgtattaaacgtcagcgcgctgcaggcaaccccggatcgcttgccgctccaattgaccacaagccgtgcagcgccccactagaacccaagtctcaagcgagccgtaatcaacgatggggagccgtccgggctgcagaatctctgactgccatccctgagcccgcatcgcctcaattactggaaactcctattcatgccagccagattcaaaaggtggaaccagcaggcaggtcacggttcacaccagagctgcagcccaaagcaagccagagcaggaagcgtagtttagcaacaatggattcccctccccaccaaaaacagcctcagcgcggagaagtgtcacagaagacagtcattattaaggaggaggaggaagatactgctgagaaacccggaaaggaggaggatgtagtgacccccaaacctggcaagcggaaacgggatcaggccgaagaggaacccaacagaatcccttcccggtcccttagacgcaccaagctgaaccaagaatccactgcgcctaaagttctcttcacaggcgtcgtggatgcacgaggggagagggccgtgctcgccctgggcggttctttagcaggtagtgccgcagaagcgagccatctggtgacagatcggatccgtagaactgtaaagtttctgtgcgccttgggcagaggcataccaattctcagcctggattggctgcaccagtcccgaaaggcgggattttttctgcctccagatgagtatgtggtaactgatcccgagcaggagaaaaacttcggattcagccttcaagatgctctgtctagggcccgagaaaggcgcctgctcgagggctacgagatctacgtcacccccggagtccagcctcccccaccacagatgggtgaaattataagctgttgcgggggaacctatcttcctagcatgccacgcagttataaaccccaacgggtggtgattacctgccctcaggactttccccactgcagcatcccactcagagttggcctcccactactcagccccgagtttttgttgacaggagtgctgaagcaggaagctaagccagaagcgtttgttttgagcccactcgagatgtccagcacata

SEQ ID NO: 345726 - DNA, 5408 bp, Artificial Sequence
  derived and/or modified sequence
atggaagatacacaagccatcgactgggacgtcgaggaggaggaggaaaccgagcagtcttccgagtcactaagatgcaatgtcgaacccgtggggcgattacacatcttctccggtgctcatggccctgaaaaggacttccctctccacttgggcaaaaacgtcgtcggtagaatgcctgactgtagtgttgcgctgccatttccttcaatttccaagcagcacgctgagatagagatcctcgcctgggacaaagccccaattctcagggattgtgggagtctgaacggaacccagatcctgcggcctcccaaggtgctcagccccggagtgtcacacaggctccgtgaccaggagctcattctgttcgccgatctgttgtgtcagtatcacagattagacgttagtcttcccttcgtttctagaggaccactgacagtggaagagactccccgagtgcaaggagaaacacaaccacagcggcttctgctagctgaagattccgaggaggaagtagacttcctgtcggaaaggcgaatggtgaagaaaagtcgcactaccagcagcagcgtgattgtacccgagtcagatgaggagggccactctcctgtactgggaggacttggccctccgtttgccttcaatttgaacagtgatacagacgtggaagagggtcagcagcccgcaactgaggaggccagcagcgctgccagaaggggcgcaacagtggaggcaaaacaatctgaagccgaggtggtgaccgagatccagttggagaaggatcagcctcttgtgaaagagcgcgacaatgacaccaaagtgaagcgcggagctggaaacggtgtggtgcctgcaggggttatcctcgaaaggagtcagccaccaggcgaggatagcgatacggatgtcgatgacgatagccgcccacccggacggcctgctgaagtgcatctagagcgggcacagcccttcgggttcattgacagtgatactgacgctgaagaggagcgcataccagccactcccgtggtgattcccatgaagaagagaaagatttttcacggggtgggaactcgtggcccaggggcaccagggctcgcccacctgcaggagtcacaggcaggttctgataccgacgttgaggagggtaaagcccctcaagccgtgcctctggagaaatcccaggcatctatggtcatcaatagtgacaccgacgacgaggaggaggtcagcgcggctcttaccctcgcccacttgaaggaatcccaacctgccatttggaaccgcgatgctgaggaggatatgccccaaagagtggtgttgctgcagagatcgcagacaactactgagagggactcggacacggatgttgaagaagaagagctcccagtcgagaatagggaggctgttttgaaggatcataccaagatcagagccctggtgcgggcacattccgagaaggaccagcccccattcggggactctgacgacagtgtggaagccgacaagtccagtccagggatccatttagagagatcacaggcatcgactactgttgacattaacacccaagtcgagaaagaagtgccaccagggtctgctatcatacatatcaagaagcatcaggtgtctgtcgagggaactaatcagaccgacgttaaagcagttggcggacctgcgaaactactcgtggtgtctctggaggaagcgtggccccttcacggagattgcgagacagacgcagaggaaggcaccagcctgaccgctagcgtggtggctgatgtgcgcaagtctcagctgcctgcagagggggacgccggtgccgaatgggcggcagcggtccttaagcaggaacgcgctcatgaagttggtgcccagggcggtccacctgtggcgcaggtcgaacaggacctgcctattagccgcgagaatctgaccgacctggttgtggacaccgatacgctcggcgaatctacccagccccagcgagagggcgctcaggtgcctacgggcagggagcgagagcaacatgtagggggtactaaggactcagaagacaactacggtgattccgaagacctagatttacaggccacccagtgttttctggaaaaccaaggcttggaagccgtgcagagcatggaggacgagcctacacaagcatttatgcttaccccccctcaggaactggggccatcccactgcagctttcagacgaccggaaccctagatgagccttgggaggtgcttgccacccaaccattctgcctacgtgagtccgaggattccgagacacaacccttcgacactcacttggaggcatatggcccttgcctctccccgcctcgcgcaatccctggagaccaacaccccgagtcacctgttcacaccgagccaatgggtattcaggggagaggaaggcagactgttgacaaggtcatgggcatccctaaggagactgccgaaagggtgggccctgagagggggcctctcgagcgggaaacagagaaacttctgccagaacggcaaactgatgtgactggagaagaggaactcaccaagggtaaacaggaccgggaacagaagcagcttctggctagggacacccaacgacaggaaagcgataagaacggtgagtcagctagcccggaaagagaccgcgaatcactaaaagttgaaatcgaaacttccgaagaaattcaggagaaacaggttcagaagcaaacactgccttccaaggcattcgaacgggaggttgagcgccctgtggcgaatcgagaatgtgatccggcagagttggaggaaaaggtgccaaaagtcatccttgaacgggatacccagcggggtgagccagaaggagggagtcaagaccaaaaggggcaggcctccagcccaacccctgaacctggagtgggagccggtgatctgcctgggccaacatctgctccggtaccaagcggaagccagtcaggaggcaggggttctcctgtatcacccagacggcaccagaagggtctcctgaactgcaagatgccaccagccgagaaagcgtcgcggattagggcagcagaaaaagtatctagaggtgatcaagagtcaccagacgcgtgcttacctcccaccgtgcctgaagctccagctcctccccagaagccactgaacagtcaatcccaaaaacacctagcccctcctcctttgctatccccactcctaccatcaattaagccaaccgtccgcaagacacgacaagacggatcccaggaggcacctgaggcgcctctctcctccgaactggagcctttccatcccaaaccaaagatccggaccaggaagtcctccaggatgacaccgtttcctgccacctcggcagcccctaaacttgaaccgagcacctcaaccgatcagccagttaccccagagcccacctctcaggccaccagaggcaggacgaatcgctctagcgtcaaaacccccgagacagtcgttccgacggcacccgaactgcagccatcaacaagcaccgatcagcccgtgacacccgaacccacgagccaggcaacacgagggaggaccgacagatcctctgtcaagacaccagaaactgttgtgcctaccgccccagagctgcaggcatcagcatctactgatcagcccgtcaccagcgaacccactagcaggaccacaaggggcagaaagaaccgaagttcagtgaaaactccagaaacagtggtccctgcggctcctgaactgcagccgagtacctctactgatcagcccgtgacccccgagccgacgtctagggcaaccagaggacggactaatagatcctcagtcaagactcccgagagcatcgtccctatcgccccagaactgcagccgtcaacttccagaaaccagctggtcactcctgagccaactagcagagctacccgttgccgaaccaaccgctctagtgtgaaaactcctgaacccgtggtaccaaccgcgccagaaccccacccaacaacatccaccgaccagccagtgacccccaaattgacctccagagcgaccaggaggaaaaccaacaggtcttccgttaaaactcctaaacccgtggaaccagcagcatccgatctcgagcctttcactcccaccgaccaatcagtcactccggaagccatcgcgcagggagggcagtccaaaaccctgcgctcaagcactgtaagagccatgcctgtccccacgacacctgagtttcagtccccagtgacaacggatcagcctatctctcctgaaccaatcacccagccttcatgtataaagaggcagagggcagctggaaatccgggaagcttggccgcaccgattgatcacaagccctgttcagccccactagagccaaaaagtcaggccagcagaaatcagagatggggggctgtgcgggctgctgaatctctcaccgcaataccagagcctgccagtcctcagctgctagaaaccccaatccatgccagtcagatccagaaagtggagcccgctggccgtagtagattcacccccgaactacagccaaaagcttctcagtctcgaaaacgcagtctggccacaatggactctcccccacaccagaagcagccccagaggggcgaggtgtcacagaaaacagtaatcattaaggaagaagaggaggacaccgcagaaaagccgggtaaagaagaggacgtcgtgaccccaaagccgggtaagagaaagagagatcaggctgaggaagagcccaatagaatcccaagccggtcccttcgcagaactaagctgaaccaggagtccactgctccgaaggtcctcttcacgggtgtagttgacgcacggggagagcgcgcagtcctagccctgggagggtcccttgctggcagcgccgctgaggcgagccatttagttacagacagaataagacgcaccgtcaaattcctctgtgccctggggcgtggtatcccaattttgagcctcgactggctgcaccagtcccggaaagctggcttcttcctgccacctgacgaatacgttgttaccgaccccgaacaagaaaagaactttggatttagtctccaggatgctctgagccgcgctcgcgagcgacgtctcctggagggctatgagatttacgtgacacctggagttcagcccccacccccacagatgggcgagattatttcgtgctgcggtggcacgtatcttcccagcatgccgcgttcttacaagccacagagggtggtcatcacatgcccacaggacttcccacattgtagtattcctcttcgggtagggttacccctgctgtcccctgaattccttttgacaggcgttctcaaacaagaagccaaacccgaggcatttgtgcttagtccactggagatgtccagtacata

SEQ ID NO: 345727 - DNA, 5408 bp, Artificial Sequence
  derived and/or modified sequence
atggaggacacccaagccattgattgggacgttgaggaagaagaggaaaccgaacagagttccgaatcccttcggtgtaacgtggaaccagtgggccgactgcatatattctcaggcgcacacggtcccgagaaagatttccctctgcacctggggaaaaatgtggtcggtcgaatgccagactgcagtgtcgccctacccttcccatcaattagtaagcaacatgcagaaatagagatcctggcgtgggacaaagctccaatccttagagattgtggtagcctgaacggtacccaaatcctgagaccaccaaaggtcctgtctcccggtgtcagccataggctgcgtgatcaggagctcatcctgttcgccgacctgctctgccagtatcatcgcttggacgtttctcttccgtttgtgagtaggggcccactgacagtggaggagacgccaagagtccagggcgaaactcagccacaacggctcctgctggccgaagatagtgaggaagaagttgactttctcagtgaaaggagaatggtcaaaaagagtcgaaccacatcatctagcgtcatcgttccagagtctgacgaagaggggcattctcccgtgcttggtgggctgggacctccgttcgcttttaatttgaactccgatacagatgtagaggaaggacagcagccagctacagaggaagcttccagcgccgcaagacggggagcaacagtggaagccaagcagtcagaagctgaggttgtaaccgagatccagctggagaaggatcagcccctggtgaaagaaagggacaacgacacgaaagttaaaagaggtgccggaaacggggtggtgcccgctggcgtgattctcgaacggtcgcagccacctggtgaggatagcgacaccgacgttgatgacgatagtcgtcctccaggcagaccagcagaggtgcacttggaaagggctcagccatttggctttatcgattcagatacggacgccgaggaggagagaatacccgctaccccggttgtgattcctatgaaaaaaagaaagatttttcatggagtgggcactaggggaccgggagccccaggcctggctcacctgcaggaatcacaggcagggagcgacacagatgttgaagagggcaaggcccctcaagcagtccccctggaaaagagccaagcctctatggtgattaactctgatacagatgatgaggaggaagtcagcgcggcattaactttggcacacttaaaggagagccagcctgcgatttggaatcgggatgccgaagaagatatgccgcagagggtggtgctactgcagaggagtcagaccaccaccgagcgagactcagatacggacgtagaggaggaagaactcccagtggaaaatcgagaggcggtactgaaagatcatactaaaatccgcgctttagtgcgggcacatagcgagaaagaccaacctcctttcggggacagcgacgactctgtagaggctgataagagctctccgggtatccatttagaaaggagccaggccagcactacagtggatataaatacacaggttgaaaaagaagtgccaccgggatctgcaatcatacatattaagaaacatcaggtgtcagtggagggaactaatcagaccgacgttaaagccgtcggaggaccggctaaattgctggtcgtgagcctcgaagaggcctggcctctacatggggactgtgagactgacgctgaagaaggcacctcccttaccgctagcgtagtagccgacgttcggaagagtcaactgccagccgagggagacgccggagcagaatgggctgccgcagtactgaaacaagagagagcccacgaggtgggcgctcagggcggacccccagtggctcaggttgagcaggacctgcccatttcaagagagaacctgactgaccttgtcgtggacacggatacgctaggtgagagtacccagcctcagcgggaaggagcacaggttcctactggacgggaaagagaacagcatgttgggggaacgaaagatagcgaggataattatggtgattccgaggacttagacctgcaagccacccaatgttttctggagaatcaaggcctcgaggcagtacagagtatggaggatgagcccacacaggcattcatgctcacgcccccacaggagttaggaccttcccattgttccttccaaactaccgggacccttgacgagccttgggaggtgttggccacccagcccttctgcctgagagagtccgaggactccgaaacacagccattcgacacacacctcgaagcatacggtccgtgcctctctccaccccgtgctatacctggggatcagcatcctgaaagccctgttcatacagaacccatggggattcagggcagggggagacagacagttgataaagttatgggtattcctaaagagactgcagagagagtggggccagaacgaggacccctagagcgcgaaactgagaagctactccctgaaaggcagaccgatgtgaccggcgaagaggagctcacaaaaggcaaacaggacagggaacagaaacagttgcttgcccgagatactcaacggcaggagtccgataaaaacggtgagtccgcctcaccggaacgggaccgagagtccctgaaggttgagatcgaaacaagcgaagagatccaggaaaagcaggtacaaaaacagactttgcctagcaaagccttcgagcgcgaggttgagcggcctgtggctaatagggagtgcgaccctgcggaactggaggagaaggttcctaaagtcatcttagagcgggacactcagaggggcgaacccgagggaggaagccaagatcagaaaggccaggcttcctcgcccacaccagaaccaggtgtcggtgccggagacctacccggacctacctcggccccagttcctagcggcagccagtccggcggtagagggagcccggtgtcgcctcgacgtcaccagaagggcctgctgaactgcaagatgcctccagccgagaaagcaagccgaatccgggcagccgagaaggtttcaagaggcgaccaggagtcacctgacgcctgtctcccacccaccgttcccgaggcacccgctccacctcaaaaaccgttgaattcccagtcacaaaagcacctcgctccacctcctctcctgtcgccactccttccctccatcaagcccaccgtcagaaagactagacaagatggatcccaagaggcgccagaggcccctctgagtagcgagctagaacctttccaccccaagcctaagatacgtacgcgcaaaagttcccgcatgaccccattcccggctactagcgctgcccctaaacttgaaccttctacatccacagatcagcctgtcactcccgagcccacatcacaggccactcggggaagaactaatcggagcagtgtcaaaactccagagaccgttgtccctacggccccagagctccagccatctacaagtaccgaccagcctgtgacccctgagcccaccagtcaggcaacacgcggtagaactgatcgctcatcagtcaagaccccagaaacggtggtgcccactgcaccagagctgcaggctagcgcgtccactgaccagccggtaacaagcgagcccacctctagaactactcgaggtaggaagaaccgaagtagtgtgaaaacaccagagactgtcgtcccggctgccccagaactacagccaagcacatctacagatcagcccgtgacacccgagccaacatctagggccacgcggggacgtactaaccgttcctccgtgaagacgcccgagagcattgtcccaatcgcccctgagctgcagcctagcaccagccgcaaccaactcgttactcctgaacctaccagccgcgctacaaggtgcaggactaaccggtctagcgtgaagacacctgagcctgtcgtgccaactgccccagaacctcacccgaccacctctactgaccagccagtgactcctaaattgacatcaagagccaccaggaggaagaccaataggagcagcgttaaaacccccaagccagtcgaacctgccgcttccgacctagaaccttttacacctacggatcaatcggtaacccccgaagcaatcgctcaggggggacagagtaagaccctcagatcttcaacagtgagagccatgccagttcctactaccccggagttccagagccctgtgaccactgatcagccgatttcgcccgagcccataacccagccatcttgcatcaaacgacagcgggcagctggcaaccctgggagccttgcagccccaatcgatcacaaaccctgctcagctccccttgagcctaagagtcaggcgtccaggaaccaaaggtggggcgctgtgcgggcagctgagtccttgacagccatcccagagccagcttctccacagctgctggaaacaccgatccatgcgagccaaatccagaaggtggagcccgcaggccgttctcggttcacccctgaactgcagccgaaagccagtcagtcaagaaagaggtccctcgctaccatggatagccctccgcatcagaaacagccgcaaaggggggaggtctcacagaagacagtgataatcaaggaagaggaggaggacaccgctgagaagcccggtaaggaggaagatgtagtgacccccaagccgggaaagcgaaagcgcgatcaggctgaggaggagcctaatcggattcccagccgatccctcagacgcaccaaactgaatcaagaaagtaccgctccaaaagtgttgttcaccggcgtggtcgatgctaggggtgaaagagcggtgctggccctgggaggcagtcttgccggttcagccgctgaagcctcacacttggttaccgatcgcatccggagaaccgtgaagtttttatgcgcgcttggcaggggcattcctattttgtccttagactggctacaccagtcgaggaaggctggtttcttccttcctcccgatgagtatgtcgtgactgacccagagcaagagaaaaattttggattttctctgcaggacgcgcttagcagggccagagaacgacgcctgttggaggggtacgaaatctacgtgacccccggagtgcagcctcctcccccacaaatgggggagatcattagttgttgtggcggtacctatttaccttccatgccacgcagctataagcctcagagggttgttattacctgcccccaggacttccctcattgttccataccgttgagagtcgggttgccattgctctcccccgagtttttgctcaccggcgtacttaaacaggaggcaaaaccggaagcttttgttctgtcgccgctcgaaatgagcagcactta

SEQ ID NO: 345728 - DNA, 5409 bp, Artificial Sequence
  derived and/or modified sequence
atggaggacacccaggccatcgactgggacgtggaggaggaggaggagaccgagcagagcagcgagagcctgagatgcaacgtggagcccgtgggcagactgcacatcttcagcggcgcccacggccccgagaaggacttccccctgcacctgggcaagaacgtggtgggcagaatgcccgactgcagcgtggccctgcccttccccagcatcagcaagcagcacgccgagatcgagatcctggcctgggacaaggcccccatcctgagagactgcggcagcctgaacggcacccagatcctgagaccccccaaggtgctgagccccggcgtgagccacagactgagagaccaggagctgatcctgttcgccgacctgctgtgccagtaccacagactggacgtgagcctgcccttcgtgagcagaggccccctgaccgtggaggagacccccagagtgcagggcgagacccagccccagagactgctgctggccgaggacagcgaggaggaggtggacttcctgagcgagagaagaatggtgaagaagagcagaaccaccagcagcagcgtgatcgtgcccgagagcgacgaggagggccacagccccgtgctgggcggcctgggcccccccttcgccttcaacctgaacagcgacaccgacgtggaggagggccagcagcccgccaccgaggaggccagcagcgccgccagaagaggcgccaccgtggaggccaagcagagcgaggccgaggtggtgaccgagatccagctggagaaggaccagcccctggtgaaggagagagacaacgacaccaaggtgaagagaggcgccggcaacggcgtggtgcccgccggcgtgatcctggagagaagccagccccccggcgaggacagcgacaccgacgtggacgacgacagcagaccccccggcagacccgccgaggtgcacctggagagagcccagcccttcggcttcatcgacagcgacaccgacgccgaggaggagagaatccccgccacccccgtggtgatccccatgaagaagagaaagatcttccacggcgtgggcaccagaggccccggcgcccccggcctggcccacctgcaggagagccaggccggcagcgacaccgacgtggaggagggcaaggccccccaggccgtgcccctggagaagagccaggccagcatggtgatcaacagcgacaccgacgacgaggaggaggtgagcgccgccctgaccctggcccacctgaaggagagccagcccgccatctggaacagagacgccgaggaggacatgccccagagagtggtgctgctgcagagaagccagaccaccaccgagagagacagcgacaccgacgtggaggaggaggagctgcccgtggagaacagagaggccgtgctgaaggaccacaccaagatcagagccctggtgagagcccacagcgagaaggaccagccccccttcggcgacagcgacgacagcgtggaggccgacaagagcagccccggcatccacctggagagaagccaggccagcaccaccgtggacatcaacacccaggtggagaaggaggtgccccccggcagcgccatcatccacatcaagaagcaccaggtgagcgtggagggcaccaaccagaccgacgtgaaggccgtgggcggccccgccaagctgctggtggtgagcctggaggaggcctggcccctgcacggcgactgcgagaccgacgccgaggagggcaccagcctgaccgccagcgtggtggccgacgtgagaaagagccagctgcccgccgagggcgacgccggcgccgagtgggccgccgccgtgctgaagcaggagagagcccacgaggtgggcgcccagggcggcccccccgtggcccaggtggagcaggacctgcccatcagcagagagaacctgaccgacctggtggtggacaccgacaccctgggcgagagcacccagccccagagagagggcgcccaggtgcccaccggcagagagagagagcagcacgtgggcggcaccaaggacagcgaggacaactacggcgacagcgaggacctggacctgcaggccacccagtgcttcctggagaaccagggcctggaggccgtgcagagcatggaggacgagcccacccaggccttcatgctgacccccccccaggagctgggccccagccactgcagcttccagaccaccggcaccctggacgagccctgggaggtgctggccacccagcccttctgcctgagagagagcgaggacagcgagacccagcccttcgacacccacctggaggcctacggcccctgcctgagcccccccagagccatccccggcgaccagcaccccgagagccccgtgcacaccgagcccatgggcatccagggcagaggcagacagaccgtggacaaggtgatgggcatccccaaggagaccgccgagagagtgggccccgagagaggccccctggagagagagaccgagaagctgctgcccgagagacagaccgacgtgaccggcgaggaggagctgaccaagggcaagcaggacagagagcagaagcagctgctggccagagacacccagagacaggagagcgacaagaacggcgagagcgccagccccgagagagacagagagagcctgaaggtggagatcgagaccagcgaggagatccaggagaagcaggtgcagaagcagaccctgcccagcaaggccttcgagagagaggtggagagacccgtggccaacagagagtgcgaccccgccgagctggaggagaaggtgcccaaggtgatcctggagagagacacccagagaggcgagcccgagggcggcagccaggaccagaagggccaggccagcagccccacccccgagcccggcgtgggcgccggcgacctgcccggccccaccagcgcccccgtgcccagcggcagccagagcggcggcagaggcagccccgtgagccccagaagacaccagaagggcctgctgaactgcaagatgccccccgccgagaaggccagcagaatcagagccgccgagaaggtgagcagaggcgaccaggagagccccgacgcctgcctgccccccaccgtgcccgaggcccccgcccccccccagaagcccctgaacagccagagccagaagcacctggcccccccccccctgctgagccccctgctgcccagcatcaagcccaccgtgagaaagaccagacaggacggcagccaggaggcccccgaggcccccctgagcagcgagctggagcccttccaccccaagcccaagatcagaaccagaaagagcagcagaatgacccccttccccgccaccagcgccgcccccaagctggagcccagcaccagcaccgaccagcccgtgacccccgagcccaccagccaggccaccagaggcagaaccaacagaagcagcgtgaagacccccgagaccgtggtgcccaccgcccccgagctgcagcccagcaccagcaccgaccagcccgtgacccccgagcccaccagccaggccaccagaggcagaaccgacagaagcagcgtgaagacccccgagaccgtggtgcccaccgcccccgagctgcaggccagcgccagcaccgaccagcccgtgaccagcgagcccaccagcagaaccaccagaggcagaaagaacagaagcagcgtgaagacccccgagaccgtggtgcccgccgcccccgagctgcagcccagcaccagcaccgaccagcccgtgacccccgagcccaccagcagagccaccagaggcagaaccaacagaagcagcgtgaagacccccgagagcatcgtgcccatcgcccccgagctgcagcccagcaccagcagaaaccagctggtgacccccgagcccaccagcagagccaccagatgcagaaccaacagaagcagcgtgaagacccccgagcccgtggtgcccaccgcccccgagccccaccccaccaccagcaccgaccagcccgtgacccccaagctgaccagcagagccaccagaagaaagaccaacagaagcagcgtgaagacccccaagcccgtggagcccgccgccagcgacctggagcccttcacccccaccgaccagagcgtgacccccgaggccatcgcccagggcggccagagcaagaccctgagaagcagcaccgtgagagccatgcccgtgcccaccacccccgagttccagagccccgtgaccaccgaccagcccatcagccccgagcccatcacccagcccagctgcatcaagagacagagagccgccggcaaccccggcagcctggccgcccccatcgaccacaagccctgcagcgcccccctggagcccaagagccaggccagcagaaaccagagatggggcgccgtgagagccgccgagagcctgaccgccatccccgagcccgccagcccccagctgctggagacccccatccacgccagccagatccagaaggtggagcccgccggcagaagcagattcacccccgagctgcagcccaaggccagccagagcagaaagagaagcctggccaccatggacagccccccccaccagaagcagccccagagaggcgaggtgagccagaagaccgtgatcatcaaggaggaggaggaggacaccgccgagaagcccggcaaggaggaggacgtggtgacccccaagcccggcaagagaaagagagaccaggccgaggaggagcccaacagaatccccagcagaagcctgagaagaaccaagctgaaccaggagagcaccgcccccaaggtgctgttcaccggcgtggtggacgccagaggcgagagagccgtgctggccctgggcggcagcctggccggcagcgccgccgaggccagccacctggtgaccgacagaatcagaagaaccgtgaagttcctgtgcgccctgggcagaggcatccccatcctgagcctggactggctgcaccagagcagaaaggccggcttcttcctgccccccgacgagtacgtggtgaccgaccccgagcaggagaagaacttcggcttcagcctgcaggacgccctgagcagagccagagagagaagactgctggagggctacgagatctacgtgacccccggcgtgcagcccccccccccccagatgggcgagatcatcagctgctgcggcggcacctacctgcccagcatgcccagaagctacaagccccagagagtggtgatcacctgcccccaggacttcccccactgcagcatccccctgagagtgggcctgcccctgctgagccccgagttcctgctgaccggcgtgctgaagcaggaggccaagcccgaggccttcgtgctgagccccctggagatgagcagcacctag

SEQ ID NO: 345729 - DNA, 6270 bp, Artificial Sequence
  derived and/or modified sequence
atggaggacacccaggccatcgactgggacgtggaggaggaggaggagaccgagcagagcagcgagagcctgagatgcaacgtggagcccgtgggcagactgcacatcttcagcggcgcccacggccccgagaaggacttccccctgcacctgggcaagaacgtggtgggcagaatgcccgactgcagcgtggccctgcccttccccagcatcagcaagcagcacgccgagatcgagatcctggcctgggacaaggcccccatcctgagagactgcggcagcctgaacggcacccagatcctgagaccccccaaggtgctgagccccggcgtgagccacagactgagagaccaggagctgatcctgttcgccgacctgctgtgccagtaccacagactggacgtgagcctgcccttcgtgagcagaggccccctgaccgtggaggagacccccagagtgcagggcgagacccagccccagagactgctgctggccgaggacagcgaggaggaggtggacttcctgagcgagagaagaatggtgaagaagagcagaaccaccagcagcagcgtgatcgtgcccgagagcgacgaggagggccacagccccgtgctgggcggcctgggcccccccttcgccttcaacctgaacagcgacaccgacgtggaggagggccagcagcccgccaccgaggaggccagcagcgccgccagaagaggcgccaccgtggaggccaagcagagcgaggccgaggtggtgaccgagatccagctggagaaggaccagcccctggtgaaggagagagacaacgacaccaaggtgaagagaggcgccggcaacggcgtggtgcccgccggcgtgatcctggagagaagccagccccccggcgaggacagcgacaccgacgtggacgacgacagcagaccccccggcagacccgccgaggtgcacctggagagagcccagcccttcggcttcatcgacagcgacaccgacgccgaggaggagagaatccccgccacccccgtggtgatccccatgaagaagagaaagatcttccacggcgtgggcaccagaggccccggcgcccccggcctggcccacctgcaggagagccaggccggcagcgacaccgacgtggaggagggcaaggccccccaggccgtgcccctggagaagagccaggccagcatggtgatcaacagcgacaccgacgacgaggaggaggtgagcgccgccctgaccctggcccacctgaaggagagccagcccgccatctggaacagagacgccgaggaggacatgccccagagagtggtgctgctgcagagaagccagaccaccaccgagagagacagcgacaccgacgtggaggaggaggagctgcccgtggagaacagagaggccgtgctgaaggaccacaccaagatcagagccctggtgagagcccacagcgagaaggaccagccccccttcggcgacagcgacgacagcgtggaggccgacaagagcagccccggcatccacctggagagaagccaggccagcaccaccgtggacatcaacacccaggtggagaaggaggtgccccccggcagcgccatcatccacatcaagaagcaccaggtgagcgtggagggcaccaaccagaccgacgtgaaggccgtgggcggccccgccaagctgctggtggtgagcctggaggaggcctggcccctgcacggcgactgcgagaccgacgccgaggagggcaccagcctgaccgccagcgtggtggccgacgtgagaaagagccagctgcccgccgagggcgacgccggcgccgagtgggccgccgccgtgctgaagcaggagagagcccacgaggtgggcgcccagggcggcccccccgtggcccaggtggagcaggacctgcccatcagcagagagaacctgaccgacctggtggtggacaccgacaccctgggcgagagcacccagccccagagagagggcgcccaggtgcccaccggcagagagagagagcagcacgtgggcggcaccaaggacagcgaggacaactacggcgacagcgaggacctggacctgcaggccacccagtgcttcctggagaaccagggcctggaggccgtgcagagcatggaggacgagcccacccaggccttcatgctgacccccccccaggagctgggccccagccactgcagcttccagaccaccggcaccctggacgagccctgggaggtgctggccacccagcccttctgcctgagagagagcgaggacagcgagacccagcccttcgacacccacctggaggcctacggcccctgcctgagcccccccagagccatccccggcgaccagcaccccgagagccccgtgcacaccgagcccatgggcatccagggcagaggcagacagaccgtggacaaggtgatgggcatccccaaggagaccgccgagagagtgggccccgagagaggccccctggagagagagaccgagaagctgctgcccgagagacagaccgacgtgaccggcgaggaggagctgaccaagggcaagcaggacagagagcagaagcagctgctggccagagacacccagagacaggagagcgacaagaacggcgagagcgccagccccgagagagacagagagagcctgaaggtggagatcgagaccagcgaggagatccaggagaagcaggtgcagaagcagaccctgcccagcaaggccttcgagagagaggtggagagacccgtggccaacagagagtgcgaccccgccgagctggaggagaaggtgcccaaggtgatcctggagagagacacccagagaggcgagcccgagggcggcagccaggaccagaagggccaggccagcagccccacccccgagcccggcgtgggcgccggcgacctgcccggccccaccagcgcccccgtgcccagcggcagccagagcggcggcagaggcagccccgtgagccccagaagacaccagaagggcctgctgaactgcaagatgccccccgccgagaaggccagcagaatcagagccgccgagaaggtgagcagaggcgaccaggagagccccgacgcctgcctgccccccaccgtgcccgaggcccccgcccccccccagaagcccctgaacagccagagccagaagcacctggcccccccccccctgctgagccccctgctgcccagcatcaagcccaccgtgagaaagaccagacaggacggcagccaggaggcccccgaggcccccctgagcagcgagctggagcccttccaccccaagcccaagatcagaaccagaaagagcagcagaatgacccccttccccgccaccagcgccgcccccgagccccaccccagcaccagcaccgcccagcccgtgacccccaagcccaccagccaggccaccagaagcagaaccaacagaagcagcgtgaagacccccgagcccgtggtgcccaccgcccccgagctgcagcccagcaccagcaccgaccagcccgtgaccagcgagcccaccagccaggtgaccagaggcagaaagagcagaagcagcgtgaagacccccgagaccgtggtgcccaccgccctggagctgcagcccagcaccagcaccgacagacccgtgaccagcgagcccaccagccaggccaccagaggcagaaagaacagaagcagcgtgaagacccccgagcccgtggtgcccaccgcccccgagctgcagcccagcaccagcaccgaccagcccgtgaccagcgagcccacctaccaggccaccagaggcagaaagaacagaagcagcgtgaagacccccgagcccgtggtgcccaccgcccccgagctgagacccagcaccagcaccgacagacccgtgacccccaagcccaccagcagaaccaccagaagcagaaccaacatgagcagcgtgaagacccccgagaccgtggtgcccaccgcccccgagctgcagatcagcaccagcaccgaccagcccgtgacccccaagcccaccagcagaaccaccagaagcagaaccaacatgagcagcgtgaagaaccccgagagcaccgtgcccatcgcccccgagctgccccccagcaccagcaccgagcagcccgtgacccccgagcccaccagcagagccaccagaggcagaaagaacagaagcagcggcaagacccccgagaccctggtgcccaccgcccccaagctggagcccagcaccagcaccgaccagcccgtgacccccgagcccaccagccaggccaccagaggcagaaccaacagaagcagcgtgaagacccccgagaccgtggtgcccaccgcccccgagctgcagcccagcaccagcaccgaccagcccgtgacccccgagcccaccagccaggccaccagaggcagaaccgacagaagcagcgtgaagacccccgagaccgtggtgcccaccgcccccgagctgcaggccagcgccagcaccgaccagcccgtgaccagcgagcccaccagcagaaccaccagaggcagaaagaacagaagcagcgtgaagacccccgagaccgtggtgcccgccgcccccgccctgcagcccagcaccagcaccgaccagcccgtgacccccgagcccaccagcagagccaccagaggcagaaccaacagaagcagcgtgaagacccccgagagcatcgtgcccatcgcccccgagctgcagcccagcaccagcagaaaccagctggtgacccccgagcccaccagcagagccaccagatgcagaaccaacagaagcagcgtgaagacccccgagcccgtggtgcccaccgcccccgagccccaccccaccaccagcaccgaccagcccgtgacccccaagctgaccagcagagccaccagaagaaagaccaacagaagcagcgtgaagacccccaagcccgtggagcccgccgccagcgacctggagcccttcacccccaccgaccagagcgtgacccccgaggccatcgcccagggcggccagagcaagaccctgagaagcagcaccgtgagagccatgcccgtgcccaccacccccgagttccagagccccgtgaccaccgaccagcccatcagccccgagcccatcacccagcccagctgcatcaagagacagagagccgccggcaaccccggcagcctggccgcccccatcgaccacaagccctgcagcgcccccctggagcccaagagccaggccagcagaaaccagagatggggcgccgtgagagccgccgagagcctgaccgccatccccgagcccgccagcccccagctgctggagacccccatccacgccagccagatccagaaggtggagcccgccggcagaagcagattcacccccgagctgcagcccaaggccagccagagcagaaagagaagcctggccaccatggacagccccccccaccagaagcagccccagagaggcgaggtgagccagaagaccgtgatcatcaaggaggaggaggaggacaccgccgagaagcccggcaaggaggaggacgtggtgacccccaagcccggcaagagaaagagagaccaggccgaggaggagcccaacagaatccccagcagaagcctgagaagaaccaagctgaaccaggagagcaccgcccccaaggtgctgttcaccggcgtggtggacgccagaggcgagagagccgtgctggccctgggcggcagcctggccggcagcgccgccgaggccagccacctggtgaccgacagaatcagaagaaccgtgaagttcctgtgcgccctgggcagaggcatccccatcctgagcctggactggctgcaccagagcagaaaggccggcttcttcctgccccccgacgagtacgtggtgaccgaccccgagcaggagaagaacttcggcttcagcctgcaggacgccctgagcagagccagagagagaagactgctggagggctacgagatctacgtgacccccggcgtgcagcccccccccccccagatgggcgagatcatcagctgctgcggcggcacctacctgcccagcatgcccagaagctacaagccccagagagtggtgatcacctgcccccaggacttcccccactgcagcatccccctgagagtgggcctgcccctgctgagccccgagttcctgctgaccggcgtgctgaagcaggaggccaagcccgaggccttcgtgctgagccccctggagatgagcagcacctag

SEQ ID NO: 345730 - DNA, 5409 bp, Artificial Sequence
  derived and/or modified sequence
atggaggacacccaggccatcgactgggacgtggaggaggaggaggagaccgagcagagcagcgagagcctgagatgcaacgtggagcccgtgggcagactgcacatcttcagcggcgcccacggccccgagaaggacttccccctgcacctgggcaagaacgtggtgggcagaatgcccgactgcagcgtggccctgcccttccccagcatcagcaagcagcacgccgagatcgagatcctggcctgggacaaggcccccatcctgagagactgcggcagcctgaacggcacccagatcctgagaccccccaaggtgctgagccccggcgtgagccacagactgagagaccaggagctgatcctgttcgccgacctgctgtgccagtaccacagactggacgtgagcctgcccttcgtgagcagaggccccctgaccgtggaggagacccccagagtgcagggcgagacccagccccagagactgctgctggccgaggacagcgaggaggaggtggacttcctgagcgagagaagaatggtgaagaagagcagaaccaccagcagcagcgtgatcgtgcccgagagcgacgaggagggccacagccccgtgctgggcggcctgggcccccccttcgccttcaacctgaacagcgacaccgacgtggaggagggccagcagcccgccaccgaggaggccagcagcgccgccagaagaggcgccaccgtggaggccaagcagagcgaggccgaggtggtgaccgagatccagctggagaaggaccagcccctggtgaaggagagagacaacgacaccaaggtgaagagaggcgccggcaacggcgtggtgcccgccggcgtgatcctggagagaagccagccccccggcgaggacagcgacaccgacgtggacgacgacagcagaccccccggcagacccgccgaggtgcacctggagagagcccagcccttcggcttcatcgacagcgacaccgacgccgaggaggagagaatccccgccacccccgtggtgatccccatgaagaagagaaagatcttccacggcgtgggcaccagaggccccggcgcccccggcctggcccacctgcaggagagccaggccggcagcgacaccgacgtggaggagggcaaggccccccaggccgtgcccctggagaagagccaggccagcatggtgatcaacagcgacaccgacgacgaggaggaggtgagcgccgccctgaccctggcccacctgaaggagagccagcccgccatctggaacagagacgccgaggaggacatgccccagagagtggtgctgctgcagagaagccagaccaccaccgagagagacagcgacaccgacgtggaggaggaggagctgcccgtggagaacagagaggccgtgctgaaggaccacaccaagatcagagccctggtgagagcccacagcgagaaggaccagccccccttcggcgacagcgacgacagcgtggaggccgacaagagcagccccggcatccacctggagagaagccaggccagcaccaccgtggacatcaacacccaggtggagaaggaggtgccccccggcagcgccatcatccacatcaagaagcaccaggtgagcgtggagggcaccaaccagaccgacgtgaaggccgtgggcggccccgccaagctgctggtggtgagcctggaggaggcctggcccctgcacggcgactgcgagaccgacgccgaggagggcaccagcctgaccgccagcgtggtggccgacgtgagaaagagccagctgcccgccgagggcgacgccggcgccgagtgggccgccgccgtgctgaagcaggagagagcccacgaggtgggcgcccagggcggcccccccgtggcccaggtggagcaggacctgcccatcagcagagagaacctgaccgacctggtggtggacaccgacaccctgggcgagagcacccagccccagagagagggcgcccaggtgcccaccggcagagagagagagcagcacgtgggcggcaccaaggacagcgaggacaactacggcgacagcgaggacctggacctgcaggccacccagtgcttcctggagaaccagggcctggaggccgtgcagagcatggaggacgagcccacccaggccttcatgctgacccccccccaggagctgggccccagccactgcagcttccagaccaccggcaccctggacgagccctgggaggtgctggccacccagcccttctgcctgagagagagcgaggacagcgagacccagcccttcgacacccacctggaggcctacggcccctgcctgagcccccccagagccatccccggcgaccagcaccccgagagccccgtgcacaccgagcccatgggcatccagggcagaggcagacagaccgtggacaaggtgatgggcatccccaaggagaccgccgagagagtgggccccgagagaggccccctggagagagagaccgagaagctgctgcccgagagacagaccgacgtgaccggcgaggaggagctgaccaagggcaagcaggacagagagcagaagcagctgctggccagagacacccagagacaggagagcgacaagaacggcgagagcgccagccccgagagagacagagagagcctgaaggtggagatcgagaccagcgaggagatccaggagaagcaggtgcagaagcagaccctgcccagcaaggccttcgagagagaggtggagagacccgtggccaacagagagtgcgaccccgccgagctggaggagaaggtgcccaaggtgatcctggagagagacacccagagaggcgagcccgagggcggcagccaggaccagaagggccaggccagcagccccacccccgagcccggcgtgggcgccggcgacctgcccggccccaccagcgcccccgtgcccagcggcagccagagcggcggcagaggcagccccgtgagccccagaagacaccagaagggcctgctgaactgcaagatgccccccgccgagaaggccagcagaatcagagccgccgagaaggtgagcagaggcgaccaggagagccccgacgcctgcctgccccccaccgtgcccgaggcccccgcccccccccagaagcccctgaacagccagagccagaagcacctggcccccccccccctgctgagccccctgctgcccagcatcaagcccaccgtgagaaagaccagacaggacggcagccaggaggcccccgaggcccccctgagcagcgagctggagcccttccaccccaagcccaagatcagaaccagaaagagcagcagaatgacccccttccccgccaccagcgccgcccccaagctggagcccagcaccagcaccgaccagcccgtgacccccgagcccaccagccaggccaccagaggcagaaccaacagaagcagcgtgaagacccccgagaccgtggtgcccaccgcccccgagctgcagcccagcaccagcaccgaccagcccgtgacccccgagcccaccagccaggccaccagaggcagaaccgacagaagcagcgtgaagacccccgagaccgtggtgcccaccgcccccgagctgcaggccagcgccagcaccgaccagcccgtgaccagcgagcccaccagcagaaccaccagaggcagaaagaacagaagcagcgtgaagacccccgagaccgtggtgcccgccgcccccgccctgcagcccagcaccagcaccgaccagcccgtgacccccgagcccaccagcagagccaccagaggcagaaccaacagaagcagcgtgaagacccccgagagcatcgtgcccatcgcccccgagctgcagcccagcaccagcagaaaccagctggtgacccccgagcccaccagcagagccaccagatgcagaaccaacagaagcagcgtgaagacccccgagcccgtggtgcccaccgcccccgagccccaccccaccaccagcaccgaccagcccgtgacccccaagctgaccagcagagccaccagaagaaagaccaacagaagcagcgtgaagacccccaagcccgtggagcccgccgccagcgacctggagcccttcacccccaccgaccagagcgtgacccccgaggccatcgcccagggcggccagagcaagaccctgagaagcagcaccgtgagagccatgcccgtgcccaccacccccgagttccagagccccgtgaccaccgaccagcccatcagccccgagcccatcacccagcccagctgcatcaagagacagagagccgccggcaaccccggcagcctggccgcccccatcgaccacaagccctgcagcgcccccctggagcccaagagccaggccagcagaaaccagagatggggcgccgtgagagccgccgagagcctgaccgccatccccgagcccgccagcccccagctgctggagacccccatccacgccagccagatccagaaggtggagcccgccggcagaagcagattcacccccgagctgcagcccaaggccagccagagcagaaagagaagcctggccaccatggacagccccccccaccagaagcagccccagagaggcgaggtgagccagaagaccgtgatcatcaaggaggaggaggaggacaccgccgagaagcccggcaaggaggaggacgtggtgacccccaagcccggcaagagaaagagagaccaggccgaggaggagcccaacagaatccccagcagaagcctgagaagaaccaagctgaaccaggagagcaccgcccccaaggtgctgttcaccggcgtggtggacgccagaggcgagagagccgtgctggccctgggcggcagcctggccggcagcgccgccgaggccagccacctggtgaccgacagaatcagaagaaccgtgaagttcctgtgcgccctgggcagaggcatccccatcctgagcctggactggctgcaccagagcagaaaggccggcttcttcctgccccccgacgagtacgtggtgaccgaccccgagcaggagaagaacttcggcttcagcctgcaggacgccctgagcagagccagagagagaagactgctggagggctacgagatctacgtgacccccggcgtgcagcccccccccccccagatgggcgagatcatcagctgctgcggcggcacctacctgcccagcatgcccagaagctacaagccccagagagtggtgatcacctgcccccaggacttcccccactgcagcatccccctgagagtgggcctgcccctgctgagccccgagttcctgctgaccggcgtgctgaagcaggaggccaagcccgaggccttcgtgctgagccccctggagatgagcagcacctag

SEQ ID NO: 345731 - protein, 643 aa, Artificial Sequence
  derived and/or modified sequence
MTPALTALLCLGLSLGPRTRVQAGPFPKPTLWAEPGSVISWGSPVTIWCQGSQEAQEYRLHKEGSPEPLDRNNPLEPKNKARFSIPSMTEHHAGRYRCHYYSSAGWSEPSDPLEMVMTGAYSKPTLSALPSPVVASGGNMTLRCGSQKGYHHFVLMKEGEHQLPRTLDSQQLHSRGFQALFPVGPVTPSHRWRFTCYYYYTNTPWVWSHPSDPLEILPSGVSRKPSLLTLQGPVLAPGQSLTLQCGSDVGYNRFVLYKEGERDFLQRPGQQPQAGLSQANFTLGPVSPSNGGQYRCYGAHNLSSEWSAPSDPLNILMAGQIYDTVSLSAQPGPTVASGENVTLLCQSWWQFDTFLLTKEGAAHPPLRLRSMYGAHKYQAEFPMSPVTSAHAGTYRCYGSYSSNPHLLSHPSEPLELVVSGPEDQPLNPPGSGPQNPPGLGSGAGTRAAGLGRYLEVLIGVSVAFVLLLFLLLFLLLRRQRHSKHRTSDQRKTDFQRPAGAAETEPKDRGLLRRSSPAADVQEENLYAAVKDTQSEDRVELDSQSPHDEDPQAVTYAPVKHSSPRREMASPPSSLSGEFLDTKDRQVEEDRQMDTEAAASEASQDVTYAQLHSLTLRRKATEPPPSQEGEPPAEPSIYATLAIH

SEQ ID NO: 345732 - protein, 648 aa, Artificial Sequence
  derived and/or modified sequence
MTPALTALLCLGLSLGPRTRVQAGPFPKPTLWAEPGSVISWGSPVTIWCQGSLEAQEYQLDKEGSPEPLDRNNPLEPKNKARFSIPSMTQHHAGRYRCHYYSSAGWSEPSDPLELVMTGAYSKPTLSALPSPVVASGGNMTLRCGSQKGYHHFVLMKEGEHQLPRTLDSQQLHSRGFQALFPVGPVTPSHRWRFTCYYYYTNTPWVWSHPSDPLEILPSGVSRKPSLLTLQGPVLAPGQSLTLQCGSDVGYNRFVLYKEGERDFLQRPGQQPQAGLSQANFTLGPVSPSNGGQYRCYGAHNLSSEWSAPSDPLNILMAGQIYDTVSLSAQPGPTVASGENVTLLCQSWWQFDTFLLTKEGAAHPPLRLRSMYGAHKYQAEFPMSPVTSAHAGTYRCYGSYSSNPHLLSHPSEPLELVVSGHSGGSSLPPTGPPSTPGGPEDQPLNPPGSGPQNRLGRYLEVLIGVSVAFVLLLFLLLFLLLRRQRHSKHRTSDQRKTDFQRPAGAAETEPKDRGLLRRSSPAADVQEENLYAAVKDTQSEDRVELDSQSPHDEDPQAVTYAPVKHSSPRREMASPPSSLSGEFLDTKDRQVEEDRQMDTEAAASEASQDVTYAQLHSLTLRRKATEPPPSQEGEPPAEPSIYATLAIH

SEQ ID NO: 345733 - DNA, 1947 bp, Artificial Sequence
  derived and/or modified sequence
atgacgcccgccctcacagccctcctttgcctcgggctaagcctgggcccgcggacacgggtgcaggccggcccatttccaaagcccactctgtgggctgaacccggaagtgtcatctcctggggaagccccgtcaccatctggtgccagggaagcctcgaggcacaggagtaccaactggataaagaaggttcacccgagccactggatagaaataacccccttgagccaaaaaataaggctagattctccattccttctatgacacagcaccacgcaggtcggtaccgttgtcactattacagttccgctgggtggtcggagccttccgaccctcttgagctcgtgatgacgggggcttactctaaacccactctttctgcacttccatcaccagtggtcgcgagcggcggcaatatgacactccgttgcggctcccagaagggctatcatcatttcgtactgatgaaagaaggtgaacaccagctgcccagaaccctcgacagccagcaattacattctcggggctttcaagctctctttcccgttggaccagtgactcccagtcatagatggcggtttacttgctattattactacaccaacaccccttgggtgtggagccatcccagcgatccgctcgaaattttaccttctggtgttagtcgcaagccctcacttctgactctccagggccctgttctcgcgcccgggcagtcactgactttgcaatgcggaagcgatgtgggatacaatcgatttgtgctgtacaaagagggcgaacgtgattttctccagagaccgggtcagcagccccaggctggtcttagtcaggccaattttactcttggacccgtgtcaccatccaacggtgggcagtacagatgctacggagcccacaacctgtcatctgagtggtctgccccctcagacccacttaacatcctgatggcaggtcagatctatgacactgtgtcactctccgcacagcctggcccgacagttgccagcggcgaaaatgtgacgcttctgtgtcagagctggtggcagtttgacacctttcttctcacgaaggaaggcgctgctcaccctcctttacggttgagatcaatgtatggcgcccacaagtaccaggccgagttccccatgtcacccgtcacctctgcgcatgccggcacgtaccgatgctacgggtcatacagttctaatccgcacctgctttcacacccgtccgagccattggaactagtcgtgagcgggcacagcgggggttcatcactgccacctaccgggcccccttccacccctggaggcccggaagatcagcctctcaacccgcccggtagcggacctcagaaccgattggggcgttacctggaagtgctcattggcgtatcggtagcctttgtgctcctgttatttcttctgctctttctactattgcggcgtcagaggcacagtaagcatcgcacaagtgatcaacgaaagaccgattttcaacggcctgctggtgccgccgagacagagccaaaagaccgcggccttctcaggcggtctagccccgcagcagatgtgcaggaagagaacctatatgctgccgtgaaagacactcagagtgaggatcgcgtggaactcgattcacaatctccccacgacgaggatcctcaagccgtgacatacgcacccgtgaagcactcaagtcccaggcgggagatggcctctccgccatcgtctttaagtggggagtttttggacacaaaagaccgtcaggtagaggaggatcggcagatggacactgaggccgcagcctctgaggcgtctcaggacgtcacctatgctcagctgcacagcctaacactccgtcggaaggcaacggagccccctccatcccaggagggcgagccccctgccgaacccagcatatacgccactcttgctatccattag

SEQ ID NO: 345734 - DNA, 1947 bp, Artificial Sequence
  derived and/or modified sequence
atgaccccagccctgacagccctgctgtgcctgggcctgagcctgggccccaggaccagggtgcaggccggccccttccccaagcccaccctgtgggccgagcccggcagcgtcatctcctggggcagccctgtgaccatctggtgccagggcagcctggaggcccaggagtaccagctggacaaggagggcagccctgagcccctggacaggaacaaccccctggagcccaagaacaaggcccgcttcagcatccccagcatgacccagcaccacgccggccgctaccgctgccactactacagcagcgctggctggagcgagcccagcgaccccctggagctggtgatgaccggggcctacagcaagcccaccctgagcgccctgcccagccctgtggtggccagcggcggcaacatgaccctgcgctgtggcagccagaagggctaccaccactttgtgctgatgaaggagggggagcaccagctgcccaggaccctggacagccagcagctgcacagccggggcttccaggccctcttccctgtgggccctgtgacccccagccaccgctggaggttcacctgctactactactacaccaacaccccctgggtgtggagccaccccagcgaccccctggagatcctgcccagcggcgtgtccaggaagcccagcctgctgaccctgcagggccctgtgctggcccctggccagagcctgaccctgcagtgtggcagtgatgtgggctacaacagatttgtgctgtacaaggagggggagcgggacttcctgcagaggcctggccagcagccccaggccggcctgagccaggccaacttcaccctgggccctgtgagccccagcaatggaggccagtaccgctgctatggagcccacaacctgagcagcgagtggagcgcccccagcgaccccctgaacatcctgatggccggccagatctatgacacagtgtccctgagcgcccagcccggccccaccgtggccagcggagaaaatgtgaccctgctgtgccagagctggtggcagtttgacaccttcctgctgaccaaggagggcgccgcccacccccccctgcggctgcgctccatgtacggggcccacaagtaccaggccgagttccccatgagccctgtgaccagcgcccatgctggcacctaccgctgctacggcagctacagcagcaacccccacctgctgagccaccccagcgagcccctggagctggtggtgtctggccacagcggcggcagcagcctgccccccaccggcccccccagcacccctgggggccctgaggaccagcccctgaaccccccaggcagcggcccccagaaccggctgggccgctacctggaggtgctgattggagtgtctgtggcctttgtgctgctgctcttcctgctgctcttcctgctgctgcggcggcagaggcacagcaagcacaggaccagtgaccagaggaagacagacttccagaggcctgctggagctgctgagacagagcccaaggaccggggcctgctgcggcgcagcagccctgctgctgatgtgcaggaggagaacctgtatgctgctgtgaaggacacccagagcgaggacagagtggagctggacagccagagcccccatgatgaggacccccaggccgtgacctacgcccctgtgaagcacagcagcccccggcgggagatggccagcccccccagcagcctgagcggggagttcctggacaccaaggaccggcaggtggaggaggaccggcagatggacacagaagctgctgccagcgaggccagccaggatgtgacctacgcccagctgcacagcctgaccctgcggaggaaggccacagagcccccacccagccaggagggggagcccccagctgagcccagcatctatgccaccctggccatccactag

SEQ ID NO: 345735 - DNA, 2114 bp, Artificial Sequence
  derived and/or modified sequence
ccatgacgcccgccctcacagccctgctctgccttgggctgagtctgggccccaggacccgcgtgcaggcagggcccttccccaaacccaccctctgggctgagccaggctctgtgatcagctgggggagccccgtgaccatctggtgtcaggggagcctggaggcccaggagtaccaactggataaagagggaagcccagagcccttggacagaaataacccactggaacccaagaacaaggccagattctccatcccatccatgacacagcaccatgcagggagataccgctgccactattacagctctgcaggctggtcagagcccagcgaccccctggagctggtgatgacaggagcctacagcaaacccaccctctcagccctgcccagccctgtggtggcctcaggggggaatatgaccctccgatgtggctcacagaagggatatcaccattttgttctgatgaaggaaggagaacaccagctcccccggaccctggactcacagcagctccacagtcgggggttccaggccctgttccctgtgggccccgtgacccccagccacaggtggaggttcacatgctattactattatacaaacaccccctgggtgtggtcccaccccagtgaccccctggagattctgccctcaggcgtgtctaggaagccctccctcctgaccctgcagggccctgtcctggcccctgggcagagcctgaccctccagtgtggctctgatgtcggctacaacagatttgttctgtataaggagggggaacgtgacttcctccagcgccctggccagcagccccaggctgggctctcccaggccaacttcaccctgggccctgtgagcccctccaatgggggccagtacaggtgctacggtgcacacaacctctcctccgagtggtcggcccccagcgaccccctgaacatcctgatggcaggacagatctatgacaccgtctccctgtcagcacagccgggccccacagtggcctcaggagagaacgtgaccctgctgtgtcagtcatggtggcagtttgacactttccttctgaccaaagaaggggcagcccatcccccactgcgtctgagatcaatgtacggagctcataagtaccaggctgaattccccatgagtcctgtgacctcagcccacgcggggacctacaggtgctacggctcatacagctccaacccccacctgctgtctcaccccagtgagcccctggagctcgtggtctcaggacactctggaggctccagcctcccacccacagggccgccctccacacctggaggtcctgaggaccagccccttaaccccccagggtcaggccctcagaatcgtctgggaagatacctggaggttttgattggggtctcggtggccttcgtcctgctgctcttcctcctcctcttcctcctcctccgacgtcagcgtcacagcaaacacaggacatctgaccagagaaagactgatttccagcgtcctgcaggggctgcggagacagagcccaaggacaggggcctgctgaggaggtccagcccagctgctgacgtccaggaagaaaacctctatgctgccgtgaaggacacacagtctgaggacagggtggagctggacagtcagagcccacacgatgaagacccccaggcagtgacgtatgccccggtgaaacactccagtcctaggagagaaatggcctctcctccctcctcactgtctggggaattcctggacacaaaggacagacaggtggaagaggacaggcagatggacactgaggctgctgcatctgaagcctcccaggatgtgacctacgcccagctgcacagcttgacccttagacggaaggcaactgagcctcctccatcccaggaaggggaacctccagctgagcccagcatctacgccactctggccatccactagcccggggggtacgcagaccccacactcagcagaaggagactcaggactgctgaaggcacgggagctgcccccagtggacaccagtgaaccccagtcagcctggacccctaacacagaccatgaggagacgctgggaacttgtgggactcacctgactcaaagatg

SEQ ID NO: 345736 - DNA, 1947 bp, Artificial Sequence
  derived and/or modified sequence
atgacccccgccctgaccgccctgctgtgcctgggcctgagcctgggtcctcgtacacgggttcaggctgggccgtttccaaaaccgaccctgtgggcggagcccggttctgttatctcctggggtagtcccgtcacgatctggtgtcagggatcacttgaagcccaggagtatcagctggacaaggagggatcccccgagccacttgatcgtaataaccccctggaacctaagaataaggcaagattctccattcccagtatgacacaacaccacgctggaagatacaggtgccattactactcctctgcaggctggagcgagccctctgatcccctagaattggtgatgacgggggcatactccaaaccaaccctcagcgcattaccctcccccgtcgtggcttctggaggcaacatgaccctacggtgcgggagccaaaaggggtaccaccacttcgtgctgatgaaggagggagaacaccaattgccaaggaccctagacagtcaacaactgcatagcagagggttccaggccctgttccctgtgggcccggttactccttctcatcgctggcgctttacctgttactactattatactaataccccttgggtctggtctcacccatctgatcccctagagatcttgccgagcggtgtgagccggaagccctcattgctgaccctgcagggccctgtcctcgcgcctggccaaagcctcactctgcagtgcgggagcgacgtcggatacaacaggtttgtgctgtacaaagagggtgaacgggactttctccagcgccccggacagcaaccccaagccggtttaagccaagccaactttactctgggtccagtcagtcccagcaatgggggccaataccggtgttatggggcacacaacctgtcttcagagtggtcagctcccagcgaccctttgaatattctgatggctggacagatctacgataccgtttcgctctctgcccaacccgggcccactgtggcatccggtgaaaatgtgaccctcctttgccaaagctggtggcagttcgatactttcctacttacaaaggaaggagccgcccacccaccattaaggttgcgcagcatgtacggagcccataagtatcaggccgagttccccatgagcccggtgacatctgctcatgcaggcacgtaccgatgctacggatcttacagcagcaatccccatttgcttagtcacccctcagagccattagaactcgtggtctcagggcatagcggcgggtccagtcttccaccgacgggaccaccgagcacccccggaggcccggaggatcagcccctcaaccccccaggcagcggtcctcaaaaccggctcggcaggtacctggaagttctcataggagtcagcgtggcgtttgtattgttgttgttcctcttgctattcttgcttcttcggcgacagcggcatagcaaacacaggacctcagatcagaggaagacagatttccagaggccagctggcgctgccgagacagaaccgaaagaccgcggcctgcttcgccgcagttctcccgccgcagacgtgcaagaggagaatctgtacgctgctgtgaaagatacgcagagtgaggatagggtggagctggactcgcagagcccccatgatgaagaccctcaagccgtcacttacgccccggtgaagcattcctccccacgccgagagatggcttccccaccttcctccctttctggagagttcctggacacaaaagacagacaagtggaagaggacaggcagatggatacggaggcagccgcctccgaagcttctcaggatgtaacatacgcacaacttcattctctcaccctccgccgcaaggccaccgaacctccaccatctcaggaaggtgagccaccagctgaaccatctatttacgccactctagctatccactag

SEQ ID NO: 345737 - DNA, 1947 bp, Artificial Sequence
  derived and/or modified sequence
atgacacctgccctgacggcgctcttgtgtctcggactgagtttgggccctagaactcgagttcaagcgggtccattccccaagcctactttgtgggctgaacccggaagcgtgatctcttggggatcccccgtcacaatctggtgccagggcagcctggaagcacaggaataccagctggacaaggagggctctcccgagcctctggacagaaacaacccgctggagcccaagaacaaggccagattcagtatcccttccatgacccagcaccacgccggtcgatacagatgccattattactcctctgctggatggagtgaaccaagtgatcccttggaactggtgatgacgggagcatattccaagcctactctgtccgcccttccaagtccagtggtagctagcggcggtaatatgactctgaggtgcggaagtcagaagggatatcaccattttgtgctcatgaaagagggcgaacaccagctgcctcggaccctggactcccagcagctgcatagccgcggtttccaggctctgttcccagtgggaccagttaccccatcacatagatggcgatttacctgttactactattacaccaatactccctgggtctggtcgcacccctcagaccctttggagatcctccccagcggtgtaagtcggaaaccatctcttctgaccctccaggggccagtgttggcgccaggccagagcctcaccttgcaatgcggctcagatgtggggtataaccggttcgtgctctacaaggaaggggagagggatttccttcagagacccggtcaacagccacaggctggactctcacaggcgaatttcacattggggccagtaagcccttccaacggtggtcaatatcggtgttacggcgctcacaatctgtcaagtgaatggtcggccccttcagaccctctcaacatcctcatggcaggccagatttatgacacagtttcgctctctgcccagccgggtcctacagtggccagtggtgagaacgtaactctgttgtgccagagctggtggcagttcgacaccttcttactaaccaaagaaggggcagcacatccgccactccggctccggtccatgtacggcgcacacaaataccaggccgaatttcccatgtctccagtgacgtcagctcatgccggtacatacagatgttatggatcatacagtagtaaccctcatctgctgtctcacccgagcgagcctctagaacttgtggtgtcgggacacagtggcggtagcagcctgcctccaacaggacccccaagcacccctgggggtccagaagaccagccgctgaaccctcccggttcaggtcctcaaaatagactgggccgttatttagaggtgctgatcggtgtgagcgttgccttcgttctcttgttattcctactgctctttctgcttcttcggagacagaggcactctaaacatcggaccagcgaccaaaggaaaaccgactttcagcgaccagcgggagcggcagaaaccgagccaaaagacaggggtcttctgcggaggagttctccagcagcagatgtccaggaggagaatctctatgctgctgtcaaagacacccagtccgaggatagggtggagctcgatagtcaatcccctcacgatgaggacccgcaagccgtaacttacgctccagtaaaacatagctctccgcgtcgggagatggcctcccctccttcgtctctgtcgggggaattcttggataccaaggatcggcaggtcgaggaagacaggcagatggatacggaggcagccgcaagtgaagcatcacaggatgtgacttacgcacaacttcactccctcaccctgcggagaaaggccacagagccacccccttcccaggaaggcgaacctcctgctgagccatccatctatgctaccctcgccatacactag

SEQ ID NO: 345738 - DNA, 1947 bp, Artificial Sequence
  derived and/or modified sequence
atgacccccgccctgaccgccctgctgtgcctgggcctgagcctgggccccagaaccagagtgcaggccggccccttccccaagcccaccctgtgggccgagcccggcagcgtgatcagctggggcagccccgtgaccatctggtgccagggcagcctggaggcccaggagtaccagctggacaaggagggcagccccgagcccctggacagaaacaaccccctggagcccaagaacaaggccagattcagcatccccagcatgacccagcaccacgccggcagatacagatgccactactacagcagcgccggctggagcgagcccagcgaccccctggagctggtgatgaccggcgcctacagcaagcccaccctgagcgccctgcccagccccgtggtggccagcggcggcaacatgaccctgagatgcggcagccagaagggctaccaccacttcgtgctgatgaaggagggcgagcaccagctgcccagaaccctggacagccagcagctgcacagcagaggcttccaggccctgttccccgtgggccccgtgacccccagccacagatggagattcacctgctactactactacaccaacaccccctgggtgtggagccaccccagcgaccccctggagatcctgcccagcggcgtgagcagaaagcccagcctgctgaccctgcagggccccgtgctggcccccggccagagcctgaccctgcagtgcggcagcgacgtgggctacaacagattcgtgctgtacaaggagggcgagagagacttcctgcagagacccggccagcagccccaggccggcctgagccaggccaacttcaccctgggccccgtgagccccagcaacggcggccagtacagatgctacggcgcccacaacctgagcagcgagtggagcgcccccagcgaccccctgaacatcctgatggccggccagatctacgacaccgtgagcctgagcgcccagcccggccccaccgtggccagcggcgagaacgtgaccctgctgtgccagagctggtggcagttcgacaccttcctgctgaccaaggagggcgccgcccacccccccctgagactgagaagcatgtacggcgcccacaagtaccaggccgagttccccatgagccccgtgaccagcgcccacgccggcacctacagatgctacggcagctacagcagcaacccccacctgctgagccaccccagcgagcccctggagctggtggtgagcggccacagcggcggcagcagcctgccccccaccggcccccccagcacccccggcggccccgaggaccagcccctgaacccccccggcagcggcccccagaacagactgggcagatacctggaggtgctgatcggcgtgagcgtggccttcgtgctgctgctgttcctgctgctgttcctgctgctgagaagacagagacacagcaagcacagaaccagcgaccagagaaagaccgacttccagagacccgccggcgccgccgagaccgagcccaaggacagaggcctgctgagaagaagcagccccgccgccgacgtgcaggaggagaacctgtacgccgccgtgaaggacacccagagcgaggacagagtggagctggacagccagagcccccacgacgaggacccccaggccgtgacctacgcccccgtgaagcacagcagccccagaagagagatggccagcccccccagcagcctgagcggcgagttcctggacaccaaggacagacaggtggaggaggacagacagatggacaccgaggccgccgccagcgaggccagccaggacgtgacctacgcccagctgcacagcctgaccctgagaagaaaggccaccgagcccccccccagccaggagggcgagccccccgccgagcccagcatctacgccaccctggccatccactag

SEQ ID NO: 345739 - protein, 388 aa, Artificial Sequence
  derived and/or modified sequence
MVDFPGYNLSGAVASFLFILLTMKQSEDFRVIGPAHPILAGVGEDALLTCQLLPKRTTMHVEVRWYRSEPSTPVFVHRDGVEVTEMQMEEYRGWVEWIENGIAKGNVALKIHNIQPSDNGQYWCHFQDGNYCGETSLLLKVAEKLLAVLSSLKVNGPSQPILVRVGEDIQLTCYLSPKANAQSMEVRWDRSHRYPAVHVYMDGDHVAGEQMAEYRGRTVLVSDAIDEGRLTLQILSARPSDDGQYRCLFEKDDVYQEASLDLKVVGLGSSPLITVEGQEDGEMQPMCSSDGWFPQPHVPWRDMEGKTIPSSSQALTQGSHGLFHVQTLLRVTNISAVDVTCSISIPFLGEEKIATFSLSESRMTFLWKTLLVWGLLLAVAVGLPRKRS

SEQ ID NO: 345740 - DNA, 1167 bp, Artificial Sequence
  derived and/or modified sequence
atggtggatttcccaggctacaacctgtctggcgccgtcgcgtccttcctgttcattctcttgacaatgaagcaatcagaagactttagggtcatcgggcccgctcacccaatccttgccggagtgggcgaagacgccttgcttacatgccagctcctcccaaaaaggacaaccatgcacgtcgaagtgcgatggtaccgctcagaaccctctactcccgtgttcgtccatcgagatggggtggaggtgacggaaatgcagatggaggagtataggggttgggtggagtggattgagaatggcatcgcaaagggcaatgtagcccttaagatacacaatattcaaccgtctgataatggacagtattggtgtcattttcaagatggaaactactgcggggagacgtcgctcctcctgaaggttgctgagaaactgttagccgtactatcaagcctcaaagtcaatgggccttcacagcccattctggtccgcgtcggggaagacatacagctgacatgctacctttctccaaaagctaacgcccaatctatggaggtgcgctgggacagatcacacaggtatcctgccgtccatgtctacatggatggggaccacgtggccggagagcagatggctgagtaccggggcaggacggtgctggtgtccgacgctatcgacgaaggacgcctaactctgcagatcttatccgccagaccctctgacgacggccagtatagatgcttgtttgaaaaggatgacgtgtaccaagaggcatccttggatttgaaagtggttggccttggctcttcgcccttgataacagtggagggccaagaggacggcgaaatgcagccaatgtgttcatctgatggctggtttccacagcctcacgttccctggcgcgatatggaaggcaagacaatcccttcttccagtcaggcactgacccagggttcacatggccttttccacgtgcaaaccctgcttcgagttactaacatctcggcagtcgatgttacctgttcaatcagtattccctttttaggcgaggaaaagatcgcaacattcagtttatctgagtcaagaatgacgttcttatggaaaacattactcgtgtggggtctcctcctggccgttgccgtgggcttgcctagaaaacgctcctag

SEQ ID NO: 345741 - DNA, 1167 bp, Artificial Sequence
  derived and/or modified sequence
atggtggatttccccgggtataacctgagcggcgctgtggcatcctttctctttatactgttaacaatgaaacaatcagaggacttccgggtgattggccccgcacatcccatcctggctggagtcggcgaggacgccctgctcacttgtcagctcctgcccaaacgtacaactatgcacgtcgaagtgcgatggtaccggtctgaaccctctactcctgtctttgtgcacagggatggcgttgaggtcacagagatgcaaatggaagagtatcgggggtgggtggaatggattgagaatggcatagccaaagggaacgttgccctgaagattcacaatatccagccctccgacaacggccagtattggtgccacttccaggacggcaattactgtggcgaaacaagtctcctgcttaaggtggccgaaaagcttctggccgtgctctctagcttgaaggttaacggccccagccaaccgatcctcgtgagagtgggcgaagatatacagttgacctgttatctaagtccaaaggctaatgcgcagtctatggaggtccgatgggaccggagccatagataccccgcggtgcatgtgtatatggacggcgaccacgtggccggggagcagatggctgagtaccgcggaagaactgtcctcgtgagtgatgcaattgacgagggccgtcttacactccagattctgagtgcaaggccctcagatgacggccagtaccgttgcctcttcgaaaaggacgatgtgtaccaggaagccagccttgacctgaaagtggtaggtctggggtcaagtccgctgataaccgtggagggacaggaggacggtgaaatgcaacccatgtgttccagcgacggctggtttccccagccccacgttccatggcgggatatggaaggcaagaccatcccttcatccagccaggccctgacccagggctcacatggcctatttcacgtgcagacactgcttagggtgactaatatatcagccgttgatgtcacctgttccatttctatccctttcctgggggaggaaaagatcgcgacattttccctttctgagtcccgcatgactttcctatggaaaaccttgctggtgtgggggctgctgctggcagtggccgtgggattacctcggaaacgctcgtag

SEQ ID NO: 345742 - DNA, 1167 bp, Artificial Sequence
  derived and/or modified sequence
atggtggattttcccgggtataacctctctggggctgtcgccagctttttgttcatattacttacaatgaagcagtcagaggactttcgagtgatcgggccagctcaccccattcttgctggtgtgggtgaagacgcccttctgacgtgccaactgttgccgaagcgaacaaccatgcatgtggaggtgagatggtaccgttccgaaccatcaactcctgtctttgttcatcgggatggcgtcgaagttaccgagatgcagatggaggagtatcggggctgggtggagtggattgaaaatgggatcgcaaagggaaacgttgccttaaagattcataacatccaaccttcagacaacgggcagtattggtgtcacttccaggacggcaattattgcggcgagacatcattgttactcaaagtggcagaaaaactgctagccgttctctcctctcttaaggtaaacggaccctcccagcccatcctggtgcgtgttggtgaagacattcagttgacttgttatttgtcccctaaagcaaacgcccagtccatggaagtccgttgggatcggagtcacagataccctgcggtgcacgtctatatggatggcgatcacgtggcaggagaacaaatggctgagtatcggggcaggacggtcctagtgagtgacgcgattgacgagggccggctcacactccagatacttagtgctaggccaagtgatgacggacaatatcgttgtctgtttgagaaagatgacgtttatcaggaagcttcattagacctgaaggtcgtagggctgggctcaagccctctcatcaccgtggagggccaggaagacggggagatgcagcccatgtgctcctccgacggctggttcccccaaccccatgtaccttggagggacatggagggcaaaaccatccctagttcttcccaggccctgacgcagggcagccacggcttgttccacgtgcagaccttgcttcgagtgaccaatatctctgctgtcgacgtgacttgcagcatttccatcccattcctaggggaggagaaaatcgcaaccttttcactaagcgaatcacggatgacattcctgtggaagaccctactggtttgggggctgctgctggctgtcgctgtcggtctgcccagaaagcggagctag

SEQ ID NO: 345743 - DNA, 1167 bp, Artificial Sequence
  derived and/or modified sequence
atggtggacttccctggctacaacctgagcggggctgtggccagcttcctgttcatcctgctgaccatgaagcagagcgaggacttccgggtcatcggccctgcccaccccatcctggccggcgtgggggaggatgccctgctgacctgccagctgctgcccaagaggaccaccatgcacgtggaggtgcgctggtacagaagtgagcccagcacccctgtgtttgtgcacagagatggagtggaggtgacagagatgcagatggaggagtaccggggctgggtggagtggattgaaaatggcatcgccaagggaaatgtggccctgaagatccacaacatccagcccagcgacaatggccagtactggtgccacttccaggacggcaactactgtggggagaccagcctgctgctgaaggtggccgagaagctgctggccgtgctgagcagcctgaaggtgaatggccccagccagcccatcctggtgcgggtgggggaggacatccagctgacctgctacctgagccccaaggccaatgcccagagcatggaggtgcgctgggacaggagccaccgctacccagctgtgcacgtgtacatggatggagaccacgtggccggggagcagatggccgagtaccggggccgcacagtgctggtgtctgatgccattgatgagggccgcctgaccctgcagatcctgagcgcccggcccagtgatgatggccagtaccgctgcctgtttgagaaggatgatgtgtaccaggaggccagcctggacctgaaggtggtgggcctgggcagcagccccctcatcaccgtggagggccaggaggatggagagatgcagcccatgtgcagcagtgatggctggttcccccagccccacgtgccctggagggacatggagggcaagaccatccccagcagcagccaggccctgacccagggcagccacggcctcttccacgtgcagaccctgctgcgggtgaccaacatctctgctgtggatgtgacctgcagcatcagcatccccttcctgggggaggagaagatcgccaccttcagcctgtctgagagcaggatgaccttcctgtggaagaccctgctggtgtggggcctgctgctggccgtggccgtgggcctgcccaggaagaggagctag

SEQ ID NO: 345744 - DNA, 1167 bp, Artificial Sequence
  derived and/or modified sequence
atggtggacttccccggctacaacctgagcggcgccgtggccagcttcctctttatccttctgactatgaagcagagcgaggatttccgggtcatcgggcctgcccatcctatcctcgcaggggtgggtgaggatgctctgttgacgtgccagttacttcctaagaggactacaatgcatgtggaggtaagatggtatagaagtgaaccatcaactcctgtcttcgtgcatagggatggagtggaagtgacagagatgcaaatggaagagtacagaggctgggtagagtggatcgaaaacggtatagccaaaggaaacgttgctctgaaaatccataacattcaaccaagcgataatgggcagtactggtgccactttcaggatggcaactactgcggtgaaactagcctgctgcttaaagtggctgagaagctcctcgcagttctctccagcttgaaggtcaacggcccatctcagcccatactcgtgagggtcggcgaagatattcaattaacatgctacctatcccccaaggcgaatgctcagagcatggaagtgaggtgggataggtcgcacagatatccagcagtgcacgtttatatggatggagatcacgttgcgggggagcaaatggctgaataccggggccgcactgtgttagtgtccgacgcaatcgatgaggggaggctaacattacagattctctccgctaggccctcagatgatggacagtataggtgcttgttcgaaaaagatgacgtgtaccaggaagcttccctggacctgaaagttgtcggactcggatcttcaccgctgatcacggtcgaagggcaagaggatggagagatgcagccgatgtgctcatccgatggttggttccctcagccacatgtgccatggcgggatatggaaggcaagaccatccctagttccagtcaagccctcacccaagggtcccatggactcttccatgtgcagaccctcttaagagttaccaatatttcagccgtagatgtgacatgttcaatctccattccctttctgggggaggagaagattgctacattctcactgtccgagagtcgtatgaccttcttgtggaaaacccttctcgtgtggggtctcttgctggccgtggctgtcggactgccgaggaagcggagctag

SEQ ID NO: 345745 - DNA, 1167 bp, Artificial Sequence
  derived and/or modified sequence
atggtggacttccccggctacaacctgagcggcgccgtggccagctttctgttcattctgttgacaatgaagcagagtgaggatttcagagtgattgggccagcccacccaatcctggccggggtcggagaagatgcgctgctaacctgccaactgctgccaaagcggaccacaatgcacgtcgaggtaaggtggtataggtctgagccgtcaacccctgttttcgtccatagggatggcgttgaggtgaccgaaatgcagatggaggaatatcgcggctgggtggagtggatcgaaaatggtatagcaaaaggcaacgtcgccctgaaaattcacaatatccagccctctgacaacggtcaatactggtgtcatttccaggacggaaattattgcggagagacatccttattgcttaaggtggctgaaaagcttttagccgtcctttcatctttaaaagtgaacggcccctcacagcccatcttagtgagagtgggcgaggatatacagctgacctgctacctgtctccgaaagctaatgcacagagcatggaagtgcggtgggacaggtctcatagataccccgctgtgcacgtctatatggacggtgaccacgtcgctggtgagcagatggccgagtatcgggggagaaccgtgctcgtgagcgatgctattgatgagggaaggctgaccctgcagatactgtcagctcggcccagtgatgatggacagtaccgttgtctgtttgaaaaggacgatgtctaccaggaagcctcactggatctgaaagtggtgggcctggggagtagtcccttaattactgtggagggccaagaggatggcgagatgcagccaatgtgttcgtccgacggatggtttcctcaaccacacgtgccgtggcgggacatggagggcaagactattccgtcatcctctcaggctcttacccagggctctcatggactgttccatgtccagaccttactgcgtgtgactaacatcagtgccgtggacgtgacgtgtagcatttccattccattcttgggcgaggagaagattgccaccttctctctcagcgaatcccgcatgaccttcttatggaaaaccctgctggtgtggggcctgttattggcggtggcggtgggattaccgcgaaaacgctcttag

SEQ ID NO: 345746 - DNA, 1167 bp, Artificial Sequence
  derived and/or modified sequence
atggtggacttccccggctacaacctgagcggcgccgtggccagcttcctttttatcctcctgaccatgaaacagtctgaggacttccgagtgattggacccgctcaccctattctagcaggggttggtgaggatgcacttctgacatgccagttgctcccaaagcgcaccaccatgcatgtggaggtgcggtggtacaggagcgagcctagcacccccgtttttgtgcatagagacggggtcgaagtgaccgaaatgcagatggaagaataccgtggctgggttgaatggattgaaaacggcattgctaagggcaatgtagcactcaagattcacaatattcaacctagtgacaacggccagtactggtgtcacttccaggacggaaattactgcggcgaaacgtccttgctgttgaaagtcgctgaaaagttactcgcagtgttgtcctccctgaaggtgaacggtcctagccagccaatcctggttcgcgtaggcgaggatatccagctcacatgctacttgtctcccaaggccaacgcccagtcaatggaagttcgctgggatagatctcacaggtacccggccgtgcacgtttacatggatggcgaccacgttgctggcgagcagatggcagaatatcgcggcagaaccgtgctggtgtcagacgcaatcgatgaggggcggctgacgctccagatattatccgctcgcccttccgacgatggccagtaccggtgcctgttcgagaaagacgacgtctatcaggaagcctcgctggatttgaaggtcgtgggcctgggaagctcacctctcattacggttgagggacaagaggacggtgagatgcagcccatgtgtagctctgacggctggtttccgcagccacacgttccgtggcgcgacatggaaggcaaaaccataccctcttcctcgcaagccctaacccaaggaagccacggactgttccacgttcagacgctgcttagagtcacgaatattagcgcggtcgatgtaacatgttctatctcgatacccttcctgggggaagaaaagatcgccaccttcagcttaagtgagtcccggatgacattcttgtggaaaaccttgctggtgtggggcctcctgctggccgtggccgttgggttgccgaggaagagaagctag

SEQ ID NO: 345747 - DNA, 1167 bp, Artificial Sequence
  derived and/or modified sequence
atggtcgactttcctgggtataatctgagcggcgcagtcgcctctttcctctttattcttctgaccatgaagcaatcagaggactttcgggttatcgggcctgcccacccaatactggctggggtgggcgaagatgcactgctcacctgtcaactgctacccaagaggaccactatgcacgtagaagtccgctggtaccggagtgaacccagcacccctgtgttcgtacaccgcgatggcgttgaggtgaccgagatgcagatggaagagtaccgtggctgggtggaatggatagaaaacgggatcgcaaagggcaacgtcgccttaaagattcataatatccagccttcggacaatgggcaatactggtgtcacttccaggacggcaattactgcggcgaaacaagtctcctcctgaaggtggctgagaaactcttagctgttctctcttccttaaaagtgaatggcccatcccagcctatcctggttagagtgggagaagatatccagctaacgtgctatctctcacccaaggcgaatgcccaatcaatggaagttcgttgggatagatctcatagataccccgctgtgcatgtgtacatggatggagaccatgtggcgggagagcagatggccgagtacagagggagaacggtcttggtgtctgacgccatcgacgaaggcaggcttaccctccagatcctaagcgcccgaccctcagatgatggacagtaccgttgtctgtttgaaaaagatgatgtgtaccaggaggcttcgttggaccttaaagttgtgggtctgggatcttcaccattgattaccgtggaaggccaggaggatggggaaatgcagccaatgtgctccagtgacggttggttcccccaaccacatgtgccctggcgcgacatggagggaaagacaattccaagctcctctcaggccctcacacaagggagtcacggactctttcatgtgcaaaccctgttaagggtaaccaatataagcgcggtggacgtgacttgttccatctccatcccgtttctcggtgaggaaaagatcgccactttctctttatctgagtcccgcatgaccttcctctggaaaaccctcctggtatggggcctgcttttagctgtggcggtcggccttcctcggaagcgatcatag

SEQ ID NO: 345748 - DNA, 1167 bp, Artificial Sequence
  derived and/or modified sequence
atggtggacttccctggctataatctgagtggtgccgtcgcatcgttcctgtttatactcctgaccatgaagcagagcgaagacttccgcgtcatagggcctgcccatccaatccttgccggagtgggagaggatgccttgttgacatgccagctgctgccaaagaggacaactatgcatgtggaagtccggtggtaccgctccgagcccagtacgcccgtattcgtacaccgcgacggcgtggaggtgactgagatgcagatggaagagtaccggggatgggtagagtggatagagaatggaatcgctaaggggaacgtcgcgctgaagatccacaatatccagccatccgataacggccagtattggtgccactttcaagacggcaactactgtggagagacatcgctgctcctcaaggttgcagaaaaactgctagcggtactgtctagcttgaaagttaatgggccttcacaacctattttggttagggtaggggaggatatccaactgacctgctacctaagtcctaaagccaacgctcagagcatggaagtgcgctgggatagatctcaccggtacccagctgtacatgtgtacatggatggggaccacgtcgccggagagcaaatggccgagtacagaggtcggaccgttttggtgtctgatgccatagacgaagggagactgacgctgcaaatcctcagcgctcgcccatctgacgacgggcagtatcgatgtttgtttgagaaggacgacgtgtatcaggaagcatccctggacttaaaggtagtgggtctgggttcctcccctttaatcacggtggaaggccaggaggatggagagatgcagccaatgtgctcctcagatggttggttccctcaacctcatgtgccatggcgcgatatggagggaaagaccatcccctcctcctctcaggctctgacccaggggagccacggcctgtttcatgttcagaccctcttacgagtgaccaatatatctgcagtcgacgtgacatgttccatctcgatcccgttcctgggagaggagaagatcgctacattctccctaagtgagagccgcatgacattcctgtggaagacactcttagtgtggggcttgctcctggccgtggcagtgggactgccacggaagcgcagctag

SEQ ID NO: 345749 - DNA, 1167 bp, Artificial Sequence
  derived and/or modified sequence
atggtcgactttccagggtacaacctgagtggtgccgtggccagcttcctctttatactgctgactatgaagcagtccgaagatttcagagtgattggccctgcccaccccattctggccggagtaggagaagacgcactcttaacatgtcagctgctccctaaaagaaccactatgcacgttgaggtacgttggtacagatctgagccctctacacccgttttcgtccaccgtgacggtgtagaagtaacagagatgcagatggaagagtatcgcggttgggtcgagtggatcgagaacggaattgccaaaggaaacgtggcactgaagatacacaacatccaaccttctgacaacggtcagtattggtgtcatttccaggacggaaactactgcggcgagacatctttgctgctcaaggtcgccgaaaaattattggccgttctgtcctcactcaaggtgaacggccctagtcaacccatactcgtacgagttggcgaggatatccagctcacttgctatctgagtcccaaggccaatgcccagagcatggaggttcgttgggataggagccacaggtatcctgccgtgcacgtttatatggacggcgaccacgtcgccggtgagcaaatggccgagtaccggggtcgcacggtcttagtgtcagacgcaatcgacgaggggagactgacattgcagatcctgtccgcaagaccctctgacgacggacagtatagatgtctgtttgagaaagatgacgtgtatcaggaggcgagtcttgatctcaaagtcgtcggcctcgggtccagccctttgatcaccgttgaaggccaggaggatggcgagatgcagccaatgtgcagttcggacggctggtttccgcagcctcatgtgccatggcgggatatggagggcaagactatccctagcagttctcaggccctgacgcagggaagccacgggttatttcacgtgcagacgctgctccgtgtgactaatatctctgctgttgacgtcacttgttctatctctatcccgtttcttggcgaggaaaagatcgccaccttctccctgagcgagtcaaggatgacatttctatggaagaccctgttggtctggggcctgctcctggccgtggccgtgggcctgcctaggaagagaagttag

SEQ ID NO: 345750 - DNA, 1167 bp, Artificial Sequence
  derived and/or modified sequence
atggtggattttccaggctacaatctgtctggtgcagtcgcctccttcctattcatcctgctgacaatgaagcagtcagaagactttagagtcattggccctgctcatcctatcctggccggggttggggaagatgccctgttaacctgccagctactccccaagaggaccacaatgcacgtggaggtgaggtggtaccgctcagagcccagcacacctgtgtttgtgcacagggatggagtggaggtgactgagatgcagatggaggagtacagaggctgggtagagtggatagagaatggcattgcaaagggaaatgtggcactgaagatacacaacatccagccctccgacaatggacaatactggtgccatttccaggatgggaactactgtggagaaacaagcttgctgctcaaagtagcagagaagctgctggccgttctgtcttctttaaaagtgaatggaccttcccagcccatcctcgtcagagtgggagaagatatacagctaacctgttacctgtcccccaaggcgaatgcacagagcatggaggtgaggtgggaccgatcccaccgttaccctgctgtgcatgtgtatatggatggggaccatgtggctggagagcagatggcagagtacagagggaggactgtgctggtgagtgacgccattgacgagggcagactgaccctgcagatactcagtgccagaccttcggacgacgggcagtaccgctgcctttttgaaaaagatgatgtctaccaagaggccagtttggatctgaaggtggtaggtctgggttcttccccactgatcactgtggaggggcaagaagatggagaaatgcagccgatgtgctcttcagatgggtggttcccacagccccacgtgccatggagggacatggaaggaaagacgataccatcatcttcccaggccctgactcaaggcagccacgggctgttccacgtgcagacattgctaagggtcacaaacatctccgctgtggacgtcacttgttccatcagcatcccctttttgggcgaggagaaaatcgcaactttttctctctcagagtccaggatgacgtttttgtggaaaacactgcttgtttggggattgcttcttgctgtggctgtaggcctgcccaggaagaggagctga

SEQ ID NO: 345751 - DNA, 1167 bp, Artificial Sequence
  derived and/or modified sequence
atggtggacttccccggctacaacctgagcggcgccgtggccagcttcctgttcatcctgctgaccatgaagcagagcgaggacttcagagtgatcggccccgcccaccccatcctggccggcgtgggcgaggacgccctgctgacctgccagctgctgcccaagagaaccaccatgcacgtggaggtgagatggtacagaagcgagcccagcacccccgtgttcgtgcacagagacggcgtggaggtgaccgagatgcagatggaggagtacagaggctgggtggagtggatcgagaacggcatcgccaagggcaacgtggccctgaagatccacaacatccagcccagcgacaacggccagtactggtgccacttccaggacggcaactactgcggcgagaccagcctgctgctgaaggtggccgagaagctgctggccgtgctgagcagcctgaaggtgaacggccccagccagcccatcctggtgagagtgggcgaggacatccagctgacctgctacctgagccccaaggccaacgcccagagcatggaggtgagatgggacagaagccacagataccccgccgtgcacgtgtacatggacggcgaccacgtggccggcgagcagatggccgagtacagaggcagaaccgtgctggtgagcgacgccatcgacgagggcagactgaccctgcagatcctgagcgccagacccagcgacgacggccagtacagatgcctgttcgagaaggacgacgtgtaccaggaggccagcctggacctgaaggtggtgggcctgggcagcagccccctgatcaccgtggagggccaggaggacggcgagatgcagcccatgtgcagcagcgacggctggttcccccagccccacgtgccctggagagacatggagggcaagaccatccccagcagcagccaggccctgacccagggcagccacggcctgttccacgtgcagaccctgctgagagtgaccaacatcagcgccgtggacgtgacctgcagcatcagcatccccttcctgggcgaggagaagatcgccaccttcagcctgagcgagagcagaatgaccttcctgtggaagaccctgctggtgtggggcctgctgctggccgtggccgtgggcctgcccagaaagagaagctag

SEQ ID NO: 345752 - protein, 598 aa, Artificial Sequence
  derived and/or modified sequence
MTPIVTVLICLGLSLGPRTHVQTGTIPKPTLWAEPDSVITQGSPVTLSCQGSLEAQEYRLYREKKSASWITRIRPELVKNGQFHIPSITWEHTGRYGCQYYSRARWSELSDPLVLVMTGAYPKPTLSAQPSPVVTSGGRVTLQCESQVAFGGFILCKEGEEEHPQCLNSQPHARGSSRAIFSVGPVSPNRRWSHRCYGYDLNSPYVWSSPSDLLELLVPGVSKKPSLSVQPGPVVAPGESLTLQCVSDVGYDRFVLYKEGERDLRQLPGRQPQAGLSQANFTLGPVSRSYGGQYRCYGAHNLSSECSAPSDPLDILITGQIRGTPFISVQPGPTVASGENVTLLCQSWRQFHTFLLTKAGAADAPLRLRSIHEYPKYQAEFPMSPVTSAHAGTYRCYGSLNSDPYLLSHPSEPLELVVSGPSMGSSPPPTGPISTPAGPEDQPLTPTGSDPQSGLGRHLGVVIGILVAVVLLLLLLLLLFLILRHRRQGKHWTSTQRKADFQHPAGAVGPEPTDRGLQWRSSPAADAQEENLYAAVKDTQPEDGVEMDTRAAASEAPQDVTYAQLHSLTLRRKATEPPPSQEREPPAEPSIYATLAIH

SEQ ID NO: 345753 - DNA, 1797 bp, Artificial Sequence
  derived and/or modified sequence
atgacacctatcgtcaccgtactgatatgtctcggactctcccttggaccgaggacccatgtgcagacggggaccatccccaagcctactttgtgggccgagcccgatagtgtcatcacccaaggctcacctgtgacactgtcctgccagggtagcctagaggcgcaggagtaccgtctttaccgggagaagaagagcgcgtcctggattaccaggatcaggcccgaactggtgaaaaatggccagtttcacataccctccatcacatgggagcacacgggaaggtacgggtgccaatattattctcgggcccgctggtctgaattgtcagatcctctggtcctggtgatgaccggagcctatcccaagccaaccctgtccgcccagccaagtccagtcgttacctccggcggccgggtgacgctgcagtgcgagtctcaggtggctttcggtgggttcatcctgtgtaaggagggggaggaggagcaccctcagtgtcttaattctcaacctcatgctcgggggagtagccgagccatcttcagtgtaggccctgtgtctcccaataggcggtggagccaccgctgttacgggtacgacctgaatagtccttatgtgtggagcagcccttcggatcttctcgagcttctcgtacccggcgtgtccaagaaacctagcctctcagtgcagcccggccctgtggtggcgcccggagagtcactgactttacagtgtgtgtccgatgtgggctacgatagatttgtactttacaaggagggcgaacgggacttgaggcagctgcctgggaggcaaccacaggctgggctatcccaggctaacttcaccctaggaccagtcagcaggagctatgggggacaataccgatgttatggtgcacataacctgtcaagcgagtgctccgccccctcggaccccttggatatactgattaccggtcagatcaggggaacccccttcattagtgttcagcccggtcctactgtagcctcaggggagaatgtaacccttttgtgccagtcttggagacagtttcatacctttcttctcaccaaggctggcgctgccgacgccccgctgcgacttcggagtatccatgagtaccccaagtaccaggctgaatttccgatgagccctgtgacatccgcgcatgcagggacctatcgctgttacggctctctcaattcggatccctacctgctcagtcacccatcagagccattggaattggtggtgtcaggcccttctatggggtcttcccctccgcctacaggccctatatccacccccgccggtcccgaagaccagcccttgacaccgaccgggagcgacccacagtctggcttgggaagacatctaggcgtggtcattggcattctggtggccgttgtgcttctgctgctgctattactgctactctttctgatcctacgccacagaagacaaggaaaacattggacctccacgcagagaaaggctgactttcagcacccagcaggcgcagtcggcccagagcccactgacagaggcctgcagtggaggtcctcacctgctgcagacgcccaggaggagaacctgtatgctgcggtcaaagacacccagcccgaggatggcgtagaaatggacacgagggcagccgcctcagaagcacctcaggatgtcacctatgcccagctgcattctttaactctgaggcggaaggccacagagcccccccccagccaggaacgagaaccaccggccgaacccagtatctatgcaacgctggccattcattag

SEQ ID NO: 345754 - DNA, 1449 bp, Artificial Sequence
  derived and/or modified sequence
atgaccggcgcttaccccaagccgaccctcagcgctcagccttcccccgtcgtgaccagtggagggcgcgtgacactgcaatgcgagtctcaggtcgcgttcgggggctttatcctttgtaaagaaggggaggaggaacacccacaatgcttgaattcacagccccacgccaggggcagcagccgcgcaatcttcagcgtcggcccagtaagtcccaaccggcgctggtctcaccggtgttatggatatgatttaaattccccttacgtatggtccagtccttcagacttactcgaattattggtgccaggagtgtcaaaaaaacctagcctcagcgtgcagccagggccagtcgtggctccgggtgagtctctgaccctgcaatgcgtgagcgatgtcggatatgaccggttcgtgttgtacaaagagggagagagagatctacgtcaactccccgggcggcagccacaagctgggcttagtcaggcgaatttcaccctcggtcccgtgtcccggtcttacggcggacagtatcgctgctacggagcccacaacctgtccagtgaatgctcagctccttccgatccactggacatcctcatcaccggccagattagaggcaccccctttattagcgtccagcccgggcctaccgtcgcgtctggagagaatgtgactctgctctgccagtcctggcgacagttccacaccttcctcctcaccaaggctggagccgccgatgcaccacttcggctgcgctccatccacgaataccctaagtatcaggctgaattcccgatgtcacccgtcacttcagctcacgccggcacatatagatgttacgggtctctgaacagtgacccgtatctgcttagccatccgagtgagcccctggagctggtcgtgagcggaccaagcatgggcagcagcccccctcccaccggtcccatcagtactccagctggcccggaagatcagcccctgacacctacaggcagcgacccacagtcaggactgggccgacatctgggggtcgtaatcggtattttagtggctgtggttctactgctgctgttgctgttgttgctcttcctaattctacgtcaccgccgacaggggaaacactggacaagcacgcagcgcaaggccgacttccaacaccccgctggagccgtagggccagaacccacagataggggcctgcagtggaggtctagccccgcagccgatgctcaggaggagaatctgtatgccgccgtcaaggatacccaaccggaagatggagtagaaatggatacccgtgcggcagccagcgaggctccgcaggacgttacatacgctcagctgcactcattgaccttaagaagaaaggccacggaacctccaccctctcaggagagggaacctcctgctgagcctagtatctatgctacactggccattcactag

SEQ ID NO: 345755 - DNA, 1797 bp, Artificial Sequence
  derived and/or modified sequence
atgacccccatcgtgacagtgctgatctgcctgggcctgagcctgggccccaggacccacgtgcagacaggcaccatccccaagcccaccctgtgggccgagccagattctgtcatcacccagggcagccctgtgaccctgagctgccagggcagcctggaggcccaggagtaccgcctgtaccgggagaagaagagcgcctcctggatcacccgcatccggcctgagctggtgaagaatggccagttccacatccccagcatcacctgggagcacacaggccgctatggctgccagtactacagccgggcccgctggagcgagctgagtgaccccctggtgctggtgatgaccggggcctaccccaagcccaccctgagcgcccagcccagccctgtggtgaccagcggcggccgggtgaccctgcagtgtgagagccaggtggccttcggcggcttcatcctgtgcaaggagggggaggaggagcacccccagtgcctgaacagccagccccacgcccggggcagcagccgggccatcttctctgtgggccctgtgagccccaacagacgctggagccaccgctgctacggctatgacctgaacagcccctacgtgtggagcagccccagcgacctgctggagctgctggtgcctggggtgtccaagaagcccagcctgtctgtgcagcccggccctgtggtggcccctggagagagcctgaccctgcagtgtgtgtctgatgtgggctatgacagatttgtgctgtacaaggagggggagcgggacctgcggcagctgcccggccggcagccccaggccggcctgagccaggccaacttcaccctgggccctgtgagccgctcctatggaggccagtaccgctgctatggagcccacaacctgagcagtgaatgttctgcccccagcgaccccctggacatcctgatcaccggccagatccggggcacccccttcatctctgtgcagcccggccccaccgtggccagcggagaaaatgtgaccctgctgtgccagagctggaggcagttccacaccttcctgctgaccaaggccggggctgctgatgcccccctgcggctgcggagcatccacgagtaccccaagtaccaggccgagttccccatgagccctgtgaccagcgcccatgctggcacctaccgctgctacggcagcctgaacagcgacccctacctgctgagccaccccagcgagcccctggagctggtggtgtctggccccagcatgggcagcagccccccacccaccggccccatcagcaccccagctggccctgaggaccagcccctgacccccactggaagtgacccccagagcggcctgggccgccacctgggcgtggtgattggcatcctggtggccgtggtgctgctgctgctgctgctgctgctgctcttcctgatcctgcggcaccggcggcagggcaagcactggaccagcacccagaggaaggctgacttccagcaccctgctggagctgtgggccctgagcccacagaccggggcctgcagtggaggagcagccctgctgctgatgcccaggaggagaacctgtatgctgctgtgaaggacacccagccagaagatggagtggagatggacaccagggctgctgccagcgaggccccccaggatgtgacctacgcccagctgcacagcctgaccctgcggaggaaggccacagagcccccacccagccaggagcgggagcccccagctgagcccagcatctatgccaccctggccatccactag

SEQ ID NO: 345756 - DNA, 1449 bp, Artificial Sequence
  derived and/or modified sequence
atgaccggggcctaccccaagcccaccctgagcgcccagcccagccctgtggtgaccagcggcggccgggtgaccctgcagtgtgagagccaggtggccttcggcggcttcatcctgtgcaaggagggggaggaggagcacccccagtgcctgaacagccagccccacgcccggggcagcagccgggccatcttctctgtgggccctgtgagccccaacagacgctggagccaccgctgctacggctatgacctgaacagcccctacgtgtggagcagccccagcgacctgctggagctgctggtgcctggggtgtccaagaagcccagcctgtctgtgcagcccggccctgtggtggcccctggagagagcctgaccctgcagtgtgtgtctgatgtgggctatgacagatttgtgctgtacaaggagggggagcgggacctgcggcagctgcccggccggcagccccaggccggcctgagccaggccaacttcaccctgggccctgtgagccgctcctatggaggccagtaccgctgctatggagcccacaacctgagcagtgaatgttctgcccccagcgaccccctggacatcctgatcaccggccagatccggggcacccccttcatctctgtgcagcccggccccaccgtggccagcggagaaaatgtgaccctgctgtgccagagctggaggcagttccacaccttcctgctgaccaaggccggggctgctgatgcccccctgcggctgcggagcatccacgagtaccccaagtaccaggccgagttccccatgagccctgtgaccagcgcccatgctggcacctaccgctgctacggcagcctgaacagcgacccctacctgctgagccaccccagcgagcccctggagctggtggtgtctggccccagcatgggcagcagccccccacccaccggccccatcagcaccccagctggccctgaggaccagcccctgacccccactggaagtgacccccagagcggcctgggccgccacctgggcgtggtgattggcatcctggtggccgtggtgctgctgctgctgctgctgctgctgctcttcctgatcctgcggcaccggcggcagggcaagcactggaccagcacccagaggaaggctgacttccagcaccctgctggagctgtgggccctgagcccacagaccggggcctgcagtggaggagcagccctgctgctgatgcccaggaggagaacctgtatgctgctgtgaaggacacccagccagaagatggagtggagatggacaccagggctgctgccagcgaggccccccaggatgtgacctacgcccagctgcacagcctgaccctgcggaggaaggccacagagcccccacccagccaggagcgggagcccccagctgagcccagcatctatgccaccctggccatccactag

SEQ ID NO: 345757 - DNA, 2286 bp, Artificial Sequence
  derived and/or modified sequence
gggactatttggttgaaagaaaacccacaatccagtgtcaagaaagaagtcaacttttcttcccctacttccctgcatttctcctctgtgctcactgccacacgcagctcaacctggacggcacagccagaggcgagatgcttctctgctgatctgagtctgcctgcagcatggacctgggtcttccctgaagcatctccagggctggagggacgactgccatgcaccgagggctcatccatccgcagagcagggcagtgggaggagacgccatgacccccatcgtcacagtcctgatctgtctcgggctgagtctgggccccaggacccacgtgcagacagggaccattcccaagcccaccctgtgggctgagccagactctgtgatcacccaggggagtcccgtcaccctcagttgtcaggggagccttgaagcccaggagtaccgtctatatagggagaaaaaatcagcatcttggattacacggatacgaccagagcttgtgaagaacggccagttccacatcccatccatcacctgggaacacacagggcgatatggctgtcagtattacagccgcgctcggtggtctgagctcagtgaccccctggtgctggtgatgacaggagcctacccaaaacccaccctctcagcccagcccagccctgtggtgacctcaggaggaagggtgaccctccagtgtgagtcacaggtggcatttggcggcttcattctgtgtaaggaaggagaagaagaacacccacaatgcctgaactcccagccccatgcccgtgggtcgtcccgcgccatcttctccgtgggccccgtgagcccgaatcgcaggtggtcgcacaggtgctatggttatgacttgaactctccctatgtgtggtcttcacccagtgatctcctggagctcctggtcccaggtgtttctaagaagccatcactctcagtgcagccgggtcctgtcgtggcccctggggaaagcctgaccctccagtgtgtctctgatgtcggctatgacagatttgttctgtacaaggagggggaacgtgaccttcgccagctccctggccggcagccccaggctgggctctcccaggccaacttcaccctgggccctgtgagccgctcctacgggggccagtacagatgctacggtgcacacaacctctcctctgagtgctcggcccccagcgaccccctggacatcctgatcacaggacagatccgtggcacacccttcatctcagtgcagccaggccccacagtggcctcaggagagaacgtgaccctgctgtgtcagtcatggcggcagttccacactttccttctgaccaaggcgggagcagctgatgccccactccgtctaagatcaatacacgaatatcctaagtaccaggctgaattccccatgagtcctgtgacctcagcccacgcggggacctacaggtgctacggctcactcaactccgacccctacctgctgtctcaccccagtgagcccctggagctcgtggtctcaggaccctccatgggttccagccccccacccaccggtcccatctccacacctgcaggccctgaggaccagcccctcacccccactgggtcggatccccaaagtggtctgggaaggcacctgggggttgtgatcggcatcttggtggccgtcgtcctactgctcctcctcctcctcctcctcttcctcatcctccgacatcgacgtcagggcaaacactggacatcgacccagagaaaggctgatttccaacatcctgcaggggctgtggggccagagcccacagacagaggcctgcagtggaggtccagcccagctgccgacgcccaggaagaaaacctctatgctgccgtgaaggacacacagcctgaagatggggtggagatggacactcgggctgctgcatctgaagccccccaggatgtgacctacgcccagctgcacagcttgaccctcagacggaaggcaactgagcctcctccatcccaggaaagggaacctccagctgagcccagcatctacgccaccctggccatccactagcccggagggtacgcagactccacactcagtagaaggagactcaggactgctgaaggcacgggagctgcccccagtggacaccaatgaaccccagtcagcctggacccctaacaaagaccatgaggagatgctgggaactttgggactcacttgattctgcagtcgaaataactaatatccctacattttttaattaaagcaacagacttctcaataa

SEQ ID NO: 345758 - DNA, 2105 bp, Artificial Sequence
  derived and/or modified sequence
aatccagtgtcaagaaagaagtcaacttttcttcccctacttccctgcatttctcctctgtgctcactgccacacgcagctcaacctggacggcacagccagaggcgagatgcttctctgctgatctgagtctgcctgcagcatggacctgggtcttccctgaagcatctccagggctggagggacgactgccatgcaccgagggctcatccatccgcagagcagggcagtgggaggagacgccatgacccccatcgtcacagtcctgatctgtctcgggagaaaaaatcagcatcttggattacacggatacgaccagagcttgtgaagaacggccagttccacatcccatccatcacctgggaacacacagggcgatatggctgtcagtattacagccgcgctcggtggtctgagctcagtgaccccctggtgctggtgatgacaggagcctacccaaaacccaccctctcagcccagcccagccctgtggtgacctcaggaggaagggtgaccctccagtgtgagtcacaggtggcatttggcggcttcattctgtgtaaggaaggagaagaagaacacccacaatgcctgaactcccagccccatgcccgtgggtcgtcccgcgccatcttctccgtgggccccgtgagcccgaatcgcaggtggtcgcacaggtgctatggttatgacttgaactctccctatgtgtggtcttcacccagtgatctcctggagctcctggtcccaggtgtttctaagaagccatcactctcagtgcagccgggtcctgtcgtggcccctggggaaagcctgaccctccagtgtgtctctgatgtcggctatgacagatttgttctgtacaaggagggggaacgtgaccttcgccagctccctggccggcagccccaggctgggctctcccaggccaacttcaccctgggccctgtgagccgctcctacgggggccagtacagatgctacggtgcacacaacctctcctctgagtgctcggcccccagcgaccccctggacatcctgatcacaggacagatccgtggcacacccttcatctcagtgcagccaggccccacagtggcctcaggagagaacgtgaccctgctgtgtcagtcatggcggcagttccacactttccttctgaccaaggcgggagcagctgatgccccactccgtctaagatcaatacacgaatatcctaagtaccaggctgaattccccatgagtcctgtgacctcagcccacgcggggacctacaggtgctacggctcactcaactccgacccctacctgctgtctcaccccagtgagcccctggagctcgtggtctcaggaccctccatgggttccagccccccacccaccggtcccatctccacacctgcaggccctgaggaccagcccctcacccccactgggtcggatccccaaagtggtctgggaaggcacctgggggttgtgatcggcatcttggtggccgtcgtcctactgctcctcctcctcctcctcctcttcctcatcctccgacatcgacgtcagggcaaacactggacatcgacccagagaaaggctgatttccaacatcctgcaggggctgtggggccagagcccacagacagaggcctgcagtggaggtccagcccagctgccgacgcccaggaagaaaacctctatgctgccgtgaaggacacacagcctgaagatggggtggagatggacactcgggctgctgcatctgaagccccccaggatgtgacctacgcccagctgcacagcttgaccctcagacggaaggcaactgagcctcctccatcccaggaaagggaacctccagctgagcccagcatctacgccaccctggccatccactagcccggagggtacgcagactccacactcagtagaaggagactcaggactgctgaaggcacgggagctgcccccagtggacaccaatgaaccccagtcagcctggacccctaacaaagaccatgaggagatgctgggaactttgggactcacttgattctgcagtcgaaataactaatatccctacattttttaattaaagcaacagacttctcaat

SEQ ID NO: 345759 - DNA, 1797 bp, Artificial Sequence
  derived and/or modified sequence
atgacccccatcgtgaccgtgctgatctgcctgggcctgagcctgggcccccggacccatgtgcagacaggtacaattcccaagcctaccctctgggcggagcccgacagcgtgattacacaaggtagccctgtcacactgtcctgtcagggcagtttagaggctcaggagtatcggctttacagagagaaaaagagcgctagttggataacccggatcaggcctgagctggtgaaaaatggtcagttccacatccccagtatcacatgggaacacacagggaggtatgggtgccaatattacagtcgcgcgcgctggtctgagcttagcgaccccctcgtgctggttatgacaggggcttaccctaagcccacgttatctgctcagccctctcctgtagtgacgtcaggaggtcgggtgaccctgcaatgcgagtcccaggtggcatttggcggtttcatcttgtgcaaggagggagaggaagagcatcctcagtgcctcaactcacaaccccatgcacgggggtcttctagggcaatcttctcagtgggacctgtcagtccaaatcggcgctggtcccaccgctgttacggctatgatttgaactcaccctatgtgtggagctccccttcagacctgttagagctccttgtgccaggcgtcagcaaaaagccatcactgtcggttcagccgggtccagttgtagctccgggggagtcattgacactacagtgcgtgtccgacgtgggttacgaccggttcgtattgtacaaagaaggcgagcgcgacctgcgacagctacccggaaggcagccccaagctggcttgagtcaagccaatttcacactgggtccggtatccaggtcctacggagggcagtataggtgttacggcgcacataacctgagctctgaatgcagtgctccctctgaccccctggacattctgataacaggccaaatccgcggcacgccgttcattagtgtgcagcctggccctaccgttgccagcggcgagaatgttacccttctctgtcagagctggaggcagtttcatacatttctccttacaaaagcgggcgcagctgatgcgccactgagattgaggtccatccacgaataccctaaatatcaggcggaatttccaatgagtcctgtgactagtgcacatgctggcacataccggtgctatggctctctcaacagcgacccttatctcctatctcatccatccgagccactggaacttgtagtgtccggccccagcatgggctccagcccccctcctacaggacccataagtacgccggcagggcccgaggatcagccccttactcctacaggttcggacccacaatcggggttgggcagacatctgggagtggtgatcggcatcctagttgccgtggtactcctcctgctgttgttattgttattattcttgattcttcgacaccgccggcaggggaaacactggacctcaacacagagaaaggcagactttcaacaccctgcgggcgcagtcggaccagagcccacggaccgaggcctccagtggcgttctagccccgccgctgacgcgcaagaggagaatctctatgccgctgtcaaggacacccagcctgaggatggtgtcgaaatggataccagagctgctgccagcgaagccccccaggacgtcacctacgcccagttacactcattaaccttgagacgcaaggccaccgagcccccgccaagtcaagagagggaaccccccgctgaaccgtccatctacgccacactggccatccactag

SEQ ID NO: 345760 - DNA, 1449 bp, Artificial Sequence
  derived and/or modified sequence
atgaccggcgcctaccccaagcccaccctgagcgcccagcccagcccagtcgtgacttctggtggcagggtcacactgcagtgtgaatctcaggtggccttcggaggatttatcttatgtaaggagggggaagaagaacatccccaatgtctcaattctcagccccacgcaaggggaagtagccgcgcaatattttctgtgggacctgtgtctcccaatagaagatggtctcaccggtgttatggatatgatctgaactctccatacgtctggtcctcacctagcgatctgctggaattgttggtacctggagtgagtaagaaaccatcactgtcagtgcagccgggtcctgtggtggctccaggtgaatccctgactctgcagtgtgtatcggacgtcggttacgatcgcttcgttctgtacaaagagggtgagcgggacctccggcagctgcccggccgacaaccacaggcaggcctgtctcaggccaacttcactttaggacctgtctctcgaagctacggaggccagtaccgctgttatggtgcccacaatctctcaagcgaatgtagcgctccatccgatcccttagatatcttgattacgggacagatcagagggactccatttattagtgtacaaccaggcccaaccgttgcaagtggcgaaaacgttacacttctgtgccaatcttggagacaattccatacattcctacttacaaaggcgggagctgctgatgctcccctgcggttaagaagcatccatgagtacccaaaatatcaggctgaattccccatgtctcccgtgaccagtgcacacgccggcacttaccgttgctacggatctctgaactctgacccttatctgttgtcacacccctcagagccactcgaacttgtcgtgtctgggccttccatgggaagctctcctccaccgactggcccaattagtactcctgcaggtccagaggaccagccgcttacccctacaggatctgaccctcagagtggtctgggtcgtcacttgggcgttgtgatcggcatccttgtggcggtcgtgctgctcctgctcctgctgcttctactcttcctgattctgagacatcgaagacaaggcaaacattggacaagcacccagcgtaaggccgactttcagcaccctgcaggcgccgtggggccagaacccacagatcggggactccaatggcgatcctctccagccgccgacgcgcaagaggagaatctttatgccgccgtaaaagacacacagccagaggatggcgttgaaatggatacaagggctgccgcttccgaagcccctcaggatgtaacgtatgcccaactgcatagcctgaccctgcggcgaaaggctactgagcccccgccctcacaggagcgagaaccaccagcggaaccctcgatttacgcaacattagccattcactag

SEQ ID NO: 345761 - DNA, 1797 bp, Artificial Sequence
  derived and/or modified sequence
atgactccaattgtgacagtacttatctgtcttggactgtctctggggccaaggactcatgtccagaccgggacgatcccgaagccaaccttgtgggccgagccagactcagtcatcacccagggcagcccggtgactctgagctgccagggatctttagaagcgcaggagtaccgactttacagggaaaaaaagtccgctagctggatcacccgcatcagacctgagctggtgaaaaatggtcaatttcacatcccaagcatcacctgggaacacacagggagatacggatgtcagtattactctcgcgcacggtggagcgagctgagcgatcctctcgtattggtcatgactggcgcttacccaaaacccacccttagcgctcagccttctccagtcgtgacatctgggggacgtgttactctgcaatgtgagtcccaggtggccttcgggggttttatcttgtgcaaagaaggtgaggaagaacacccgcagtgtttgaatagtcagccccacgccaggggctcgagtagagcaatatttagtgtcggaccggtctcccctaataggagatggagccatcggtgctatggatatgacctgaacagcccctacgtgtggtcttctccatccgacctcctagaactgttagtccccggagtttcaaagaagccgagcctctcggtgcagccagggccagttgtagccccaggcgaaagcctcacactgcaatgcgtgagtgatgtgggctatgatcggtttgttctgtataaggaaggcgaaagggacctgaggcagcttcctggacggcaaccacaagcagggctatcacaggccaacttcaccctcggccctgtcagtcggagttacggcggacagtatcggtgttacggggctcataacctgtcaagcgagtgtagtgcccctagcgatccccttgacatcttaatcactggccagatccgtggaactccctttatctctgtccagccgggaccgaccgtggcttctggcgagaacgtcaccttactttgccaaagttggagacagtttcatacatttctcctgacaaaagccggtgccgcagacgcacccctgcgactcaggtccattcatgaataccccaagtaccaggctgagttccctatgtcaccagtgacatcagcacacgcgggaacatacaggtgctatggctccctgaactcagacccctacttactcagccatccttctgaaccgttagagctggtggtcagtggacccagtatggggtcctctccacccccaactgggcctatctcaacgccggctgggccagaagaccaacctctgacaccaaccgggagcgacccccagagcggtctcggtagacatttgggagtcgtcataggcatcttggtcgctgtcgtgctgttgctgctgctgcttctgctgctgtttttaattttgcgacatcgcagacaaggtaaacattggacctccacccagcgcaaggccgacttccaacatcctgccggtgcggttggtccggagccaactgacagaggattgcagtggagaagctcacccgctgcagatgcccaggaagagaacctgtacgctgcagtgaaggacacacagcccgaagacggcgtagagatggacacacgcgcagctgccagcgaagctccacaagacgtgacctacgcccagttgcatagcctgaccctgcgaagaaaggctactgagccacctccatcacaggaacgcgagcctcccgctgaaccttcgatctatgccaccctagccatccattag

SEQ ID NO: 345762 - DNA, 1449 bp, Artificial Sequence
  derived and/or modified sequence
atgacaggagcttacccaaaacccacactttctgcccagccgagcccagtggttacctccggcggacgcgtgacactccaatgcgagtcccaggtcgcctttggcggattcatcctctgcaaagagggggaggaagagcaccctcaatgcctcaacagtcagcctcatgcaaggggttcatcgcgcgctatcttcagcgtcgggccagtgagtcccaatagaaggtggagccatagatgctacggatacgacctgaactccccctacgtttggtcctctccctcagacctgctggagctgctggttcctggtgtatctaagaagccctcgttgtctgtgcagccaggtcccgtggtcgctccgggagaatctttaacgctccagtgcgtgagcgacgttggttacgaccgcttcgtgctgtacaaagaaggcgagagggatctacgtcagctccctggacggcagccacaagctggtttatcacaggcaaacttcaccttggggcctgtgagtaggagttatggagggcagtatcggtgttacggagcgcacaatctgagttctgaatgctccgccccatctgaccccctggatatcctgataaccggccagattaggggtacaccgttcatctcagtccagcccggacctacagtcgcctccggagagaatgtcactctgctgtgtcagagttggagacaatttcacacttttctgttaaccaaagcaggagccgctgatgcacctctgagactgcgatcgatccacgagtaccctaaatatcaagcggagttccccatgagtccagtgacatcagcccatgccggtacataccggtgttacggctctctgaacagcgatccctaccttctctcgcacccctcagaaccgttggagctagtggttagcggcccaagcatgggctcttcgccacccccaacagggcctatttccacaccagccggtcctgaggaccagcctttgacgcccacaggcagtgatcctcagagcggattaggcagacatctaggcgtggtaatcgggatactcgtggccgtcgtactcctgttactgctcctgctgctgctatttctgatacttcgccatagaagacaaggcaagcactggacctcaactcagcggaaggctgactttcaacatccagcaggagctgtcggacctgagccgaccgatcgcggattgcagtggcggtcttctccagccgctgatgctcaagaagagaatctgtatgccgctgtcaaggatacccaaccagaggatggcgtggagatggatactagagccgcagcttccgaggcaccacaggatgtcacttacgcgcagttacactcgctgactttacgcagaaaggccaccgagcctcccccatctcaggagagagagcctccagccgaaccttcaatctacgccactctcgccattcattag

SEQ ID NO: 345763 - DNA, 1797 bp, Artificial Sequence
  derived and/or modified sequence
atgacccccatcgtgaccgtgctgatctgcctgggcctgagcctgggccccagaacccacgtgcagaccggcaccatccccaagcccaccctgtgggccgagcccgacagcgtgatcacccagggcagccccgtgaccctgagctgccagggcagcctggaggcccaggagtacagactgtacagagagaagaagagcgccagctggatcaccagaatcagacccgagctggtgaagaacggccagttccacatccccagcatcacctgggagcacaccggcagatacggctgccagtactacagcagagccagatggagcgagctgagcgaccccctggtgctggtgatgaccggcgcctaccccaagcccaccctgagcgcccagcccagccccgtggtgaccagcggcggcagagtgaccctgcagtgcgagagccaggtggccttcggcggcttcatcctgtgcaaggagggcgaggaggagcacccccagtgcctgaacagccagccccacgccagaggcagcagcagagccatcttcagcgtgggccccgtgagccccaacagaagatggagccacagatgctacggctacgacctgaacagcccctacgtgtggagcagccccagcgacctgctggagctgctggtgcccggcgtgagcaagaagcccagcctgagcgtgcagcccggccccgtggtggcccccggcgagagcctgaccctgcagtgcgtgagcgacgtgggctacgacagattcgtgctgtacaaggagggcgagagagacctgagacagctgcccggcagacagccccaggccggcctgagccaggccaacttcaccctgggccccgtgagcagaagctacggcggccagtacagatgctacggcgcccacaacctgagcagcgagtgcagcgcccccagcgaccccctggacatcctgatcaccggccagatcagaggcacccccttcatcagcgtgcagcccggccccaccgtggccagcggcgagaacgtgaccctgctgtgccagagctggagacagttccacaccttcctgctgaccaaggccggcgccgccgacgcccccctgagactgagaagcatccacgagtaccccaagtaccaggccgagttccccatgagccccgtgaccagcgcccacgccggcacctacagatgctacggcagcctgaacagcgacccctacctgctgagccaccccagcgagcccctggagctggtggtgagcggccccagcatgggcagcagccccccccccaccggccccatcagcacccccgccggccccgaggaccagcccctgacccccaccggcagcgacccccagagcggcctgggcagacacctgggcgtggtgatcggcatcctggtggccgtggtgctgctgctgctgctgctgctgctgctgttcctgatcctgagacacagaagacagggcaagcactggaccagcacccagagaaaggccgacttccagcaccccgccggcgccgtgggccccgagcccaccgacagaggcctgcagtggagaagcagccccgccgccgacgcccaggaggagaacctgtacgccgccgtgaaggacacccagcccgaggacggcgtggagatggacaccagagccgccgccagcgaggccccccaggacgtgacctacgcccagctgcacagcctgaccctgagaagaaaggccaccgagcccccccccagccaggagagagagccccccgccgagcccagcatctacgccaccctggccatccactag

SEQ ID NO: 345764 - DNA, 1449 bp, Artificial Sequence
  derived and/or modified sequence
atgaccggcgcctaccccaagcccaccctgagcgcccagcccagccccgtggtgaccagcggcggcagagtgaccctgcagtgcgagagccaggtggccttcggcggcttcatcctgtgcaaggagggcgaggaggagcacccccagtgcctgaacagccagccccacgccagaggcagcagcagagccatcttcagcgtgggccccgtgagccccaacagaagatggagccacagatgctacggctacgacctgaacagcccctacgtgtggagcagccccagcgacctgctggagctgctggtgcccggcgtgagcaagaagcccagcctgagcgtgcagcccggccccgtggtggcccccggcgagagcctgaccctgcagtgcgtgagcgacgtgggctacgacagattcgtgctgtacaaggagggcgagagagacctgagacagctgcccggcagacagccccaggccggcctgagccaggccaacttcaccctgggccccgtgagcagaagctacggcggccagtacagatgctacggcgcccacaacctgagcagcgagtgcagcgcccccagcgaccccctggacatcctgatcaccggccagatcagaggcacccccttcatcagcgtgcagcccggccccaccgtggccagcggcgagaacgtgaccctgctgtgccagagctggagacagttccacaccttcctgctgaccaaggccggcgccgccgacgcccccctgagactgagaagcatccacgagtaccccaagtaccaggccgagttccccatgagccccgtgaccagcgcccacgccggcacctacagatgctacggcagcctgaacagcgacccctacctgctgagccaccccagcgagcccctggagctggtggtgagcggccccagcatgggcagcagccccccccccaccggccccatcagcacccccgccggccccgaggaccagcccctgacccccaccggcagcgacccccagagcggcctgggcagacacctgggcgtggtgatcggcatcctggtggccgtggtgctgctgctgctgctgctgctgctgctgttcctgatcctgagacacagaagacagggcaagcactggaccagcacccagagaaaggccgacttccagcaccccgccggcgccgtgggccccgagcccaccgacagaggcctgcagtggagaagcagccccgccgccgacgcccaggaggagaacctgtacgccgccgtgaaggacacccagcccgaggacggcgtggagatggacaccagagccgccgccagcgaggccccccaggacgtgacctacgcccagctgcacagcctgaccctgagaagaaaggccaccgagcccccccccagccaggagagagagccccccgccgagcccagcatctacgccaccctggccatccactag

SEQ ID NO: 345765 - protein, 597 aa, Artificial Sequence
  derived and/or modified sequence
MTPIVTVLICLGLSLGPRTHVQTGTIPKPTLWAEPDSVITQGSPVTLSCQGSLEAQEYRLYREKKSASWITRIRPELVKNGQFHIPSITWEHTGRYGCQYYSRARWSELSDPLVLVMTGAYPKPTLSAQPSPVVTSGGRVTLQCESQVAFGGFILCKEGEEEHPQCLNSQPHARGSSRAIFSVGPVSPNRRWSHRCYGYDLNSPYVWSSPSDLLELLVPGVSKKPSLSVQPGPVVAPGESLTLQCVSDVGYDRFVLYKEGERDLRQLPGRQPQAGLSQANFTLGPVSRSYGGQYRCYGAHNLSSECSAPSDPLDILITGQIRGTPFISVQPGPTVASGENVTLLCQSWRQFHTFLLTKAGAADAPLRLRSIHEYPKYQAEFPMSPVTSAHAGTYRCYGSLNSDPYLLSHPSEPLELVVSGPSMGSSPPPTGPISTPGPEDQPLTPTGSDPQSGLGRHLGVVIGILVAVVLLLLLLLLLFLILRHRRQGKHWTSTQRKADFQHPAGAVGPEPTDRGLQWRSSPAADAQEENLYAAVKDTQPEDGVEMDTRAAASEAPQDVTYAQLHSLTLRRKATEPPPSQEREPPAEPSIYATLAIH

SEQ ID NO: 345766 - DNA, 1794 bp, Artificial Sequence
  derived and/or modified sequence
atgactcccatcgtgaccgtcttgatctgccttggattgtcgttaggtccacgcactcatgttcagactggaacaatccccaagcctaccctgtgggccgaaccggactctgtcattactcaaggcagccctgtgaccctcagctgccaaggaagcctcgaagctcaggagtataggctgtatcgagagaagaagagtgcctcctggattacgagaattcgtccggaacttgtgaaaaacggccaattccacatcccgtccattacttgggaacataccggccgttacggctgccagtactatagcagagcaaggtggtctgagttatctgaccccctggtccttgtgatgaccggcgcgtatccaaagcctaccctgagcgctcagccgagcccagttgtgaccagtggcggacgagtgactttgcaatgtgagtctcaggtcgccttcggaggctttattctctgtaaggaaggagaggaggagcacccacagtgcttaaatagccagccgcatgcgcggggatcttctagggctattttctctgtaggtcctgtgtcccctaatcgcaggtggtcccaccgatgctacggttacgatctgaacagtccctacgtttggtcaagtccctcagaccttctggagttactggtgcccggtgtgtcgaagaaacccagtctgagtgtacagcccggacccgtagtggctccaggagagtctctgacgctgcaatgcgtgtctgacgtgggatacgacaggttcgtgctttataaggaaggcgaaagagatctccgacagcttcccgggaggcagccccaggctggcctgtcccaagccaactttacgcttggacctgtgtccagaagctatggcggtcaataccggtgctacggagcgcacaacctgagctcagaatgtagtgccccttcggatcctctggatattctcattaccgggcagattcgaggcactccatttatatcagtgcagcccgggccaaccgtagccagtggtgagaatgtgaccctgctgtgtcagagctggcgtcaattccacaccttcttgctgactaaggcaggtgccgctgacgcacctctgcgtctgcgcagcattcacgagtacccaaagtaccaggctgagtttccgatgtcccctgtgacatcggcacacgctggtacctaccgatgttatggaagtttgaatagcgacccgtatctccttagccatccatcagaaccgttggaacttgtcgtgtctggcccatcaatggggtcctccccacccccaacgggtcccatatctacgcccggtccagaagaccagcccctgactcccacaggttctgaccctcaaagcggcctcggccgacacttgggcgtcgtaatcggaatactggtcgccgtggtgctgctattgctcctactgctgcttctgtttctgatcctgcggcatagacgacagggcaaacactggacgtcgactcaaagaaaggcggatttccagcaccccgccggagccgtgggacctgaaccaactgatcggggcctccagtggagaagcagtcccgccgccgacgctcaggaggaaaacttgtacgcggcagttaaggatacccagcccgaggacggagttgaaatggatacccgcgccgctgcatcagaggccccgcaagatgtgacttacgctcagttacattctctgacattgcgtcgtaaggctaccgagcctcccccatctcaggaaagagagccccccgcggagccaagcatatatgcaactctggctatacactag

SEQ ID NO: 345767 - DNA, 1794 bp, Artificial Sequence
  derived and/or modified sequence
atgacccccatcgtgacagtgctgatctgcctgggcctgagcctgggccccaggacccacgtgcagacaggcaccatccccaagcccaccctgtgggccgagccagattctgtcatcacccagggcagccctgtgaccctgagctgccagggcagcctggaggcccaggagtaccgcctgtaccgggagaagaagagcgcctcctggatcacccgcatccggcctgagctggtgaagaatggccagttccacatccccagcatcacctgggagcacacaggccgctatggctgccagtactacagccgggcccgctggagcgagctgagtgaccccctggtgctggtgatgaccggggcctaccccaagcccaccctgagcgcccagcccagccctgtggtgaccagcggcggccgggtgaccctgcagtgtgagagccaggtggccttcggcggcttcatcctgtgcaaggagggggaggaggagcacccccagtgcctgaacagccagccccacgcccggggcagcagccgggccatcttctctgtgggccctgtgagccccaacagacgctggagccaccgctgctacggctatgacctgaacagcccctacgtgtggagcagccccagcgacctgctggagctgctggtgcctggggtgtccaagaagcccagcctgtctgtgcagcccggccctgtggtggcccctggagagagcctgaccctgcagtgtgtgtctgatgtgggctatgacagatttgtgctgtacaaggagggggagcgggacctgcggcagctgcccggccggcagccccaggccggcctgagccaggccaacttcaccctgggccctgtgagccgctcctatggaggccagtaccgctgctatggagcccacaacctgagcagtgaatgttctgcccccagcgaccccctggacatcctgatcaccggccagatccggggcacccccttcatctctgtgcagcccggccccaccgtggccagcggagaaaatgtgaccctgctgtgccagagctggaggcagttccacaccttcctgctgaccaaggccggggctgctgatgcccccctgcggctgcggagcatccacgagtaccccaagtaccaggccgagttccccatgagccctgtgaccagcgcccatgctggcacctaccgctgctacggcagcctgaacagcgacccctacctgctgagccaccccagcgagcccctggagctggtggtgtctggccccagcatgggcagcagccccccacccaccggccccatcagcaccccaggccctgaggaccagcccctgacccccaccggcagtgacccccagagcggcctgggccgccacctgggcgtggtgattggcatcctggtggccgtggtgctgctgctgctgctgctgctgctgctcttcctgatcctgcggcaccggcggcagggcaagcactggaccagcacccagaggaaggctgacttccagcaccctgctggagctgtgggccctgagcccacagaccggggcctgcagtggaggagcagccctgctgctgatgcccaggaggagaacctgtatgctgctgtgaaggacacccagccagaagatggagtggagatggacaccagggctgctgccagcgaggccccccaggatgtgacctacgcccagctgcacagcctgaccctgcggaggaaggccacagagcccccacccagccaggagcgggagcccccagctgagcccagcatctatgccaccctggccatccactag

SEQ ID NO: 345768 - DNA, 2784 bp, Artificial Sequence
  derived and/or modified sequence
ggggaagccactgctaccctcatcaggaagggcagacacaagaagcaccagttctatttgctgctacatcccggctctcgcaccgagggctcatccatccgcagagcagggcagtgggaggagacgccatgacccccatcgtcacagtcctgatctgtctcgggctgagtctgggccccaggacccacgtgcagacagggaccattcccaagcccaccctgtgggctgagccagactctgtgatcacccaggggagtcccgtcaccctcagttgtcaggggagccttgaagcccaggagtaccgtctatatagggagaaaaaatcagcatcttggattacacggatacgaccagagcttgtgaagaacggccagttccacatcccatccatcacctgggaacacacagggcgatatggctgtcagtattacagccgcgctcggtggtctgagctcagtgaccccctggtgctggtgatgacaggagcctacccaaaacccaccctctcagcccagcccagccctgtggtgacctcaggaggaagggtgaccctccagtgtgagtcacaggtggcatttggcggcttcattctgtgtaaggaaggagaagaagaacacccacaatgcctgaactcccagccccatgcccgtgggtcgtcccgcgccatcttctccgtgggccccgtgagcccgaatcgcaggtggtcgcacaggtgctatggttatgacttgaactctccctatgtgtggtcttcacccagtgatctcctggagctcctggtcccaggtgtttctaagaagccatcactctcagtgcagccgggtcctgtcgtggcccctggggaaagcctgaccctccagtgtgtctctgatgtcggctatgacagatttgttctgtacaaggagggggaacgtgaccttcgccagctccctggccggcagccccaggctgggctctcccaggccaacttcaccctgggccctgtgagccgctcctacgggggccagtacagatgctacggtgcacacaacctctcctctgagtgctcggcccccagcgaccccctggacatcctgatcacaggacagatccgtggcacacccttcatctcagtgcagccaggccccacagtggcctcaggagagaacgtgaccctgctgtgtcagtcatggcggcagttccacactttccttctgaccaaggcgggagcagctgatgccccactccgtctaagatcaatacacgaatatcctaagtaccaggctgaattccccatgagtcctgtgacctcagcccacgcggggacctacaggtgctacggctcactcaactccgacccctacctgctgtctcaccccagtgagcccctggagctcgtggtctcaggaccctccatgggttccagccccccacccaccggtcccatctccacacctggccctgaggaccagcccctcacccccactgggtcggatccccaaagtggtctgggaaggcacctgggggttgtgatcggcatcttggtggccgtcgtcctactgctcctcctcctcctcctcctcttcctcatcctccgacatcgacgtcagggcaaacactggacatcgacccagagaaaggctgatttccaacatcctgcaggggctgtggggccagagcccacagacagaggcctgcagtggaggtccagcccagctgccgacgcccaggaagaaaacctctatgctgccgtgaaggacacacagcctgaagatggggtggagatggacactcgggctgctgcatctgaagccccccaggatgtgacctacgcccagctgcacagcttgaccctcagacggaaggcaactgagcctcctccatcccaggaaagggaacctccagctgagcccagcatctacgccaccctggccatccactagcccggagggtacgcagactccacactcagtagaaggagactcaggactgctgaaggcacgggagctgcccccagtggacaccaatgaaccccagtcagcctggacccctaacaaagaccatgaggagatgctgggaactttgggactcacttgattctgcagtcgaaataactaatatccctacattttttaattaaagcaacagacttctcaataatcaatgagttaaccgagaaaactaaaatcagaagtaagaatgtgctttaaactgaatcacaatataaatattacacatcacacaatgaaattgaaaaagtacaaaccacaaatgaaaaaagtagaaacgaaaaaaaaaaactaggaaatgaatgacgttggctttcgtataaggaatttagaaaaagaataaccaattattccaaatgaaggtgtaagaaagggaataagaagaagaagagttgctcatgaggaaaaaccaaaacttgaaaattcaacaaagccaatgaagctcattcttgaaaatattaattacagtcataaatcctaactacattgagcaagagaaagaaagagcaggcacgcatttccatatgggagtgagccagcagacagcccagcagatcctacacacattttcacaaactaaccccagaacaggctgcaaacctataccaatatactagaaaatgcagattaaatggatgaaatattcaaaactggagtttacataatgaacgtaagagtaatcagagaatctgactcattttaaatgtgtgtgtatgtgtgtgtatatatatgtgtgtgtgtgtgtgtgtgtgtgtgtgtgaaaaacattgactgtaataaaaatgttcccatcgta

SEQ ID NO: 345769 - DNA, 1794 bp, Artificial Sequence
  derived and/or modified sequence
atgacccccatcgtgaccgtgctgatctgcctgggcctgagcctggggccccggactcacgtgcagaccggtacaattcctaagcctacgctttgggccgaaccggactctgtcatcacacagggcagcccagttacactgtcctgccagggtagcctcgaagcacaggagtacaggctctaccgtgagaaaaaatcggcctcttggattaccagaattcgcccagagctcgtgaagaacggtcagttccacattcccagtatcacatgggagcacacaggccgatatggctgtcagtactactctcgcgcccggtggtcggagttatctgatcctctcgtgcttgttatgacaggagcttatcccaagcctaccttgtctgcccagccctctcccgtggtgacttccggtgggcgtgtgaccctacagtgtgaaagtcaggtggcctttggcgggttcatcctctgtaaggaaggagaagaagagcatccgcagtgcttgaattcccagccccatgcccggggttcaagccgggccattttctcagtggggcctgtgtcacccaaccgacggtggagtcatcggtgttacgggtatgatctgaactccccttacgtgtggtcatccccctccgacctcctggaactgctcgtgccaggggttagtaaaaaaccctcactgtccgttcagcctggccccgttgtggctcctggagaaagcttgacactacagtgtgtttccgacgttggctatgatagatttgtcctctataaggaaggcgagcgggatctccggcagctgcctggtagacagcctcaggcaggtctatcgcaggcaaattttaccttaggtcctgtgagtcgtagttacgggggacagtatcggtgttacggagcccataacttatcgtccgaatgctccgcgccttctgacccattggatatcctgataactggccagatcagagggaccccctttataagcgttcagcctgggcctacggtggcaagcggtgaaaatgtcactctcctttgccaaagctggcgtcagttccataccttcctgctgacaaaggctggagccgccgatgcccctcttcggctgcgcagcatacatgaatatcccaagtaccaagccgagtttcccatgagcccagtcacttccgcccatgctggtacgtataggtgctacggctctctgaattccgacccctatctcctatcacacccatctgaacccctggagcttgtagtgtccggaccatccatgggtagctccccacctcctactggacccatctcgaccccgggaccggaggatcagcctctgacacccaccgggtctgacccacagtccggccttgggaggcacctaggagtagttattgggatccttgtggcagtagtgcttctgttgctcttactactgctgctgttcctgatactcagacataggagacaagggaaacactggactagcacccagcggaaggccgacttccaacacccagccggcgcagtaggccccgaaccgactgatcgaggccttcagtggcggagcagccctgccgcggacgcgcaggaagagaacctgtacgcagcagtgaaggacactcagccagaggacggtgtggagatggataccagagccgctgcaagtgaggcgcctcaggacgtaacttatgcacagcttcattcgctgacactacggcgtaaagctacagagcctcctcctagccaagagcgggaacctcctgccgagccatccatctacgcaacactggccattcactag

SEQ ID NO: 345770 - DNA, 1794 bp, Artificial Sequence
  derived and/or modified sequence
atgaccccaattgtgacggtgctcatatgtctggggctgagtctgggaccacgaacccatgtgcagacgggtacgattccaaaaccgactctctgggctgaaccagacagcgtgattactcagggctcgccagtcactttatcatgccagggttctcttgaggcacaggaataccgattatacagggaaaagaaatcggcatcctggattacccggattcgccctgagcttgtgaagaacgggcagttccatattcccagtattacctgggagcataccggccgttatggctgccagtactactccagagctcggtggtctgagctgagcgatcccttagtactggtcatgaccggcgcttatcctaagcccaccttgagtgcccagccttctccagtagtgacaagcggtggcagagtgactttacagtgcgagtcccaagtcgccttcgggggattcattttgtgcaaggagggggaggaggagcatccccagtgtctcaatagccagccccatgcccgtggatcgagccgagccatcttcagcgtgggacctgtgtctcctaatcgcaggtggagtcataggtgttatggttacgatcttaactccccctacgtctggtcctcacccagcgacttactggagttgctggtgcctggggtctccaagaagccttccttgtcagtccagccaggccctgtagtggcccctggcgaatccctgacattgcagtgcgtctctgatgtcggctatgaccgatttgtcctgtataaggagggagagagagatctgaggcagctgcctggcagacagccacaagcgggactctcacaggcaaactttacgcttggcccagtaagtcgttcctacggcggtcaatataggtgctatggcgctcataacttaagtagcgagtgctctgcaccttccgatcccctggacatccttattacaggacagatccggggtacgccctttatcagcgtgcagcctggccctacggtcgcttccggagaaaatgtgaccttattatgtcagagttggcggcaatttcataccttcctcctaaccaaggcgggagcagcagacgctcccttgcgcctccggagcattcacgagtatccaaagtaccaggcagaattccctatgtcccctgtgacatccgcccacgccggaacgtatcgctgctacgggtcactcaactctgatccttaccttctcagccaccccagcgaaccattggagctggtagtgtccggaccatcaatgggctctagcccaccacctaccgggcctatctcgacgccaggtcccgaggaccaacctttgaccccaactggatccgaccctcaaagcggattgggcaggcacttgggcgtggtgatcggcatcttagtcgcggtggtcttgctcttgttgcttctactgctgctgttcctgattcttcgacaccgtcgacagggcaagcactggacttctacacagcgaaaagccgattttcagcaccccgctggagccgtggggccagaaccaaccgatcgcggtcttcagtggagatcgtccccggcagcagatgcacaggaagagaacctgtacgcggcagtgaaagacacgcaacccgaagatggggtcgagatggataccagagctgcagcaagcgaagcacctcaagatgtcacctacgctcagcttcattcgctgacactgcggcgaaaggcaactgaacctccgccttctcaggagcgtgaaccacctgcagaaccctcaatatacgccacattagcgattcactag

SEQ ID NO: 345771 - DNA, 1794 bp, Artificial Sequence
  derived and/or modified sequence
atgacccccatcgtgaccgtgctgatctgcctgggcctgagcctgggccccagaacccacgtgcagaccggcaccatccccaagcccaccctgtgggccgagcccgacagcgtgatcacccagggcagccccgtgaccctgagctgccagggcagcctggaggcccaggagtacagactgtacagagagaagaagagcgccagctggatcaccagaatcagacccgagctggtgaagaacggccagttccacatccccagcatcacctgggagcacaccggcagatacggctgccagtactacagcagagccagatggagcgagctgagcgaccccctggtgctggtgatgaccggcgcctaccccaagcccaccctgagcgcccagcccagccccgtggtgaccagcggcggcagagtgaccctgcagtgcgagagccaggtggccttcggcggcttcatcctgtgcaaggagggcgaggaggagcacccccagtgcctgaacagccagccccacgccagaggcagcagcagagccatcttcagcgtgggccccgtgagccccaacagaagatggagccacagatgctacggctacgacctgaacagcccctacgtgtggagcagccccagcgacctgctggagctgctggtgcccggcgtgagcaagaagcccagcctgagcgtgcagcccggccccgtggtggcccccggcgagagcctgaccctgcagtgcgtgagcgacgtgggctacgacagattcgtgctgtacaaggagggcgagagagacctgagacagctgcccggcagacagccccaggccggcctgagccaggccaacttcaccctgggccccgtgagcagaagctacggcggccagtacagatgctacggcgcccacaacctgagcagcgagtgcagcgcccccagcgaccccctggacatcctgatcaccggccagatcagaggcacccccttcatcagcgtgcagcccggccccaccgtggccagcggcgagaacgtgaccctgctgtgccagagctggagacagttccacaccttcctgctgaccaaggccggcgccgccgacgcccccctgagactgagaagcatccacgagtaccccaagtaccaggccgagttccccatgagccccgtgaccagcgcccacgccggcacctacagatgctacggcagcctgaacagcgacccctacctgctgagccaccccagcgagcccctggagctggtggtgagcggccccagcatgggcagcagccccccccccaccggccccatcagcacccccggccccgaggaccagcccctgacccccaccggcagcgacccccagagcggcctgggcagacacctgggcgtggtgatcggcatcctggtggccgtggtgctgctgctgctgctgctgctgctgctgttcctgatcctgagacacagaagacagggcaagcactggaccagcacccagagaaaggccgacttccagcaccccgccggcgccgtgggccccgagcccaccgacagaggcctgcagtggagaagcagccccgccgccgacgcccaggaggagaacctgtacgccgccgtgaaggacacccagcccgaggacggcgtggagatggacaccagagccgccgccagcgaggccccccaggacgtgacctacgcccagctgcacagcctgaccctgagaagaaaggccaccgagcccccccccagccaggagagagagccccccgccgagcccagcatctacgccaccctggccatccactag

SEQ ID NO: 345772 - protein, 652 aa, Artificial Sequence
  derived and/or modified sequence
MTPILTVLICLGLSLGPRTHVQAGHLPKPTLWAEPGSVITQGSPVTLRCQGGQETQEYRLYREKKTALWITRIPQELVKKGQFPIPSITWEHAGRYRCYYGSDTAGRSESSDPLELVVTGAYIKPTLSAQPSPVVNSGGNVILQCDSQVAFDGFSLCKEGEDEHPQCLNSQPHARGSSRAIFSVGPVSPSRRWWYRCYAYDSNSPYEWSLPSDLLELLVLGVSKKPSLSVQPGPIVAPEETLTLQCGSDAGYNRFVLYKDGERDFLQLAGAQPQAGLSQANFTLGPVSRSYGGQYRCYGAHNLSSEWSAPSDPLDILIAGQFYDRVSLSVQPGPTVASGENVTLLCQSQGWMQTFLLTKEGAADDPWRLRSTYQSQKYQAEFPMGPVTSAHAGTYRCYGSQSSKPYLLTHPSDPLELVVSGPSGGPSSPTTGPTSTSAGPEDQPLTPTGSDPQSGLGRHLGVVIGILVAVILLLLLLLLLFLILRHRRQGKHWTSTQRKADFQHPAGAVGPEPTDRGLQWRSSPAADAQEENLYAAVKHTQPEDGVEMDTRQSPHDEDPQAVTYAEVKHSRPRREMASPPSPLSGEFLDTKDRQAEEDRQMDTEAAASEAPQDVTYAQLHSLTLRREATEPPPSQEGPSPAVPSIYATLAIH

SEQ ID NO: 345773 - DNA, 1956 bp, Artificial Sequence
  derived and/or modified sequence
atgacaccaatcttaacagtgctgatatgccttggtcttagcctaggaccccgaactcacgtgcaggcaggtcatttgcccaaaccaaccctgtgggccgaaccaggaagtgtgattacacaaggatctcccgtaacattacggtgccagggcggacaagaaacacaggagtacaggttgtaccgggaaaaaaagacggccctgtggattacgagaatcccccaggaactggtaaagaaaggccagtttcccattccaagcattacttgggaacacgctgggagatatcggtgttactatggaagtgatacagctgggcgaagcgagagtagcgatcccctggagctggtagtcacaggtgcctatatcaagccaactttaagtgctcagccatctcccgtggtaaattcaggtggaaatgtgattctccaatgtgattcacaggttgctttcgacggttttagcctttgcaaggagggagaggatgaacatccccagtgcctgaatagccagccccatgctcggggctcttcaagagccattttttccgtgggaccagttagccctagccggcgctggtggtatcgatgttacgcatacgattccaactcgccttatgagtggagcctgccgtccgacctcctggagcttctggtgctcggcgtaagcaaaaaaccatcattgtccgtacaacccgggcccatcgttgcccccgaagagactctgactctgcagtgcggatccgacgctgggtataatagattcgtcctgtacaaagatggcgagcgggatttccttcaactggcaggcgctcagccccaggccggcttgtcgcaggccaactttaccctgggaccggtcagtagatcttatggcggccaatataggtgctatggcgcgcacaacctcagctcagagtggagcgctccttcagaccccttggacattctgatcgccggccagttctacgatcgagtgtctctaagcgtgcaacctgggccaaccgtcgcctcaggggaaaatgtcacacttctatgccagagccaaggctggatgcagactttcctgttgacaaaagagggtgccgctgacgatccttggagacttcgatcaacttatcagagccaaaaatatcaagcggagtttccaatgggacccgtgaccagcgcccatgccgggacatatagatgctatggatcccagtcctcgaagccctatctgctgacgcacccttcagatccgctcgagctggtcgtgagcgggcccagcggcggaccaagctcacctaccactggccctactagtacatccgcaggacctgaggaccaacctttaacgcccactggttctgaccctcagtccggccttgggcggcacctcggggtggtgattggaatactcgttgcagtgatcctgctactgctgttgctcctgctgcttttcttgattctcaggcaccgccgccaaggcaagcactggacaagcacacagaggaaagctgactttcaacaccccgccggcgccgtcggacctgagcctacggatcgcggattgcagtggcgatcctcgcccgctgccgacgcccaggaagaaaacctttacgccgccgttaaacacactcaaccagaggatggagtggagatggatacgcgcagcccacacgatgaggatccacaggcggttacatatgctgaggtgaagcattccagaccgagaagggagatggcctcgcccccttcccctctctctggcgagttcctagacaccaaggacaggcaagctgaagaagatcgccaaatggacaccgaagccgccgccagcgaagccccccaggacgtgacctatgcccaactgcacagtctgacactgcgccgtgaagccaccgagcccccaccgagtcaggaagggccctcaccagctgtcccttcaatttatgccaccttagccattcactag

SEQ ID NO: 345774 - DNA, 1956 bp, Artificial Sequence
  derived and/or modified sequence
atgacacccattctcacagtgctgatttgcctcggcctctccctgggtcccaggactcacgtgcaggctgggcacttgcccaagcctaccctgtgggccgagccaggtagtgtgatcacccagggatctcctgtgactcttcgttgtcagggaggccaggagacccaagagtaccgtctgtatcgcgaaaagaagacagcattgtggattacacggattccacaagaactcgtgaagaagggtcagtttccgattccttcaattacgtgggaacatgctggacgctaccggtgctattacggctctgataccgctggtcgtagtgaatcctcagatccacttgagctggtggtgaccggggcttatataaagcccactttgagtgctcagccctccccagtggtgaactcaggggggaacgtcatactccagtgtgactcccaggtggcttttgatgggtttagtctgtgcaaggagggagaggatgagcacccccagtgtcttaattctcaaccacacgcaaggggcagcagccgggccatcttttctgtgggtcctgtgagcccaagtcggcgctggtggtataggtgttatgcctatgattccaatagcccatacgagtggagtctgcccagcgatctcctggaactgctggtgttaggcgtgtctaagaaacctagtctgtctgtccaacctggcccaattgtggcaccggaagaaacactaaccttgcaatgcggctcggacgcagggtacaaccggtttgtcttatataaggacggagaacgcgactttctgcaacttgccggcgcccagccccaggcaggtctgagccaggccaacttcacacttggcccagtttcaaggagctatggaggccagtaccgatgctatggagcccataacctgtcctccgagtggagtgcccccagcgacccgctcgacattctcattgctggacagttctatgacagagtgagcctgtcagtacagcccggcccgaccgtggcttcaggcgaaaatgtgactctattatgtcagagtcagggatggatgcaaacgttcttactgacgaaagagggcgccgcagatgatccttggcggttgcggtccacctatcagagtcagaaataccaggccgagtttcctatgggcccagtgacctccgctcacgctgggacctatcgctgctatggctcccagagtagcaaaccctatttgctaacacaccccagcgaccccttggaactcgtagtgtccggcccatctgggggacccagctcgcctacaaccggacccacctcaacaagcggaccggaggatcaaccgctgacaccaacaggaagtgaccctcagtccggtctcgggcgccatctgggggtggttataggtatacttgtcgccgtgatcctgctgctcctacttcttctgctcttgtttctgatcttgaggcaccggaggcagggtaaacattggacttccacacaacgcaaagctgatttccagcacccagccggagccgttgggcccgagcctaccgacagagggctccagtggaggtcttcacctgctgccgacgcacaagaggaaaatctatatgccgctgtgaagcatactcaacctgaagacggggtggagatggatacaaggcagagcccacatgatgaggatccccaggccgtcacctacgccgaagtaaaacatagtcggccgaggagagagatggcttctcctcccagtcctttaagtggggaattcctggatactaaagatcggcaggccgaggaagatcgtcagatggatacagaggctgccgctagcgaggcgccccaggatgttacatacgcgcagttacattcattgacgctgcgccgcgaggctaccgagccaccaccatcccaagagggacccagcccagctgtcccaagcatctacgccactctggccatacattag

SEQ ID NO: 345775 - DNA, 1959 bp, Artificial Sequence
  derived and/or modified sequence
atgactcccatcctgactgttcttatctgtttgggtctctctttaggcccaaggacgcacgtgcaggccggccatctcccaaagccaacgctctgggccgaacctgggtccgtcatcacccagggatctcccgtaacactgaggtgccaaggcgggcaagagacacaggaataccgattgtatcgggaaaagaaaaccgctctctggatcacccgtatcccccaagagctggtgaagaaggggcagtttccgattccctctatcacatgggaacacgccggacgctaccggtgttattacggctctgatactgccggaaggtcagagagttcggacccactggagttggtggtcactggggcttatattaagccgaccctctccgcccagccaagccccgtagtgaattccggcgggaatgtgatcttacagtgtgacagtcaggtcgcctttgatggcttcagtctgtgtaaggaaggcgaagatgagcatccacagtgcttaaacagccaaccacacgcacgcgggtccagcagagccatcttttcagtggggcctgttagtccctcccgacgctggtggtatcgctgctacgcctatgactctaactctccctatgaatggagtttacctagtgacttgctcgagctgctggtcctgggcgtcagcaaaaaaccctcattatctgtgcagcccggccccatcgtggctccggaggagactctaactctacagtgtggcagcgacgctggatataaccgctttgtgttatataaggatggcgagagagacttcctgcagctggcgggcgcgcagccacaggccggtctcagccaggctaacttcacactgggccctgtcagtcgcagctacggtggtcagtaccggtgctatggggcacacaatctcagtagcgaatggagtgcccccagcgacccactggatattttgatcgctggccaattctacgacagggtcagtcttagcgtgcaacccggcccaactgtcgcgtccggcgagaacgtgaccttattatgtcagtcacagggttggatgcagacctttctgctaactaaggaaggtgccgcggacgacccatggaggctgaggtctacgtatcagagtcagaagtaccaagctgagtttccaatgggccccgttaccagtgctcatgcaggcacataccgatgctacggctcccagagcagtaaaccctatctgctgacacatccgagcgacccgttggaacttgtggtgtctggaccaagcggaggcccttctagcccaacaaccggacccacatcaacatctgcaggtccagaagaccaaccgttgacaccaacaggatcagatccacagtccggactgggtagacaccttggcgttgtgattggtattctggtcgccgttattctgctgctgctgctgttactgctgctgtttctcatcctgcggcacagacgccagggcaaacattggacctcaacacaacgcaaggcagattttcagcatcccgccggggccgtgggccccgagccgacagatcgaggtctgcagtggcgcagttcccctgctgctgatgctcaggaagagaatttatacgccgcagtgaagcacactcagccagaagacggggttgagatggatacaaggcaatcgccgcatgacgaggacccccaggcagttacctacgcagaagtgaagcatagtcgtcctcggagggagatggcctcaccaccctccccattatccggtgagttccttgacactaaagatagacaggccgaagaggatcgacaaatggacactgaggctgcagcttccgaggccccacaagacgtcacatacgcacagttgcactccctgacactccgtagggaggcaacagaacctccaccctcccaggagggcccctcccccgctgtgccaagcatatatgccacattggccatacactag

SEQ ID NO: 345776 - DNA, 1956 bp, Artificial Sequence
  derived and/or modified sequence
atgacccccatcctgactgtgctgatctgcctgggcctgagcctgggccccaggacccacgtgcaggccggccacctgcccaagcccaccctgtgggccgagcccggcagcgtcatcacccagggcagccctgtgaccctgcgctgccagggcggccaggagacccaggagtaccgcctgtaccgggagaagaagacagccctgtggatcacccgcatcccccaggagctggtgaagaagggccagttccccatccccagcatcacctgggagcacgccggccgctaccgctgctactacggcagtgacacagctggccgctctgagagcagtgaccccctggagctggtggtgactggagcctacatcaagcccaccctgagcgcccagcccagccctgtggtgaacagcggcggcaatgtcatcctgcagtgtgacagccaggtggcctttgatggcttcagcctgtgcaaggagggagaagatgagcacccccagtgcctgaacagccagccccacgcccggggcagcagccgggccatcttctctgtgggccctgtgagccccagccgccgctggtggtaccgctgctacgcctatgacagcaacagcccctatgagtggagcctgcccagcgacctgctggagctgctggtgctgggcgtgtccaagaagcccagcctgtctgtgcagcccggccccatcgtggcccctgaggagaccctgaccctgcagtgtggcagtgatgctggctacaacagatttgtgctgtacaaggatggagagcgggacttcctgcagctggccggggcccagccccaggccggcctgagccaggccaacttcaccctgggccctgtgagccgctcctatggaggccagtaccgctgctacggggcccacaacctgagcagcgagtggagcgcccccagcgaccccctggacatcctgattgctggccagttctatgacagagtgtccctgtctgtgcagcccggccccaccgtggccagcggggagaatgtgaccctgctgtgccagagccagggctggatgcagaccttcctgctgaccaaggagggcgctgctgatgacccctggaggctgcggagcacctaccagagccagaagtaccaggccgagttccccatgggccctgtgaccagcgcccacgccggcacctaccgctgctacggcagccagagcagcaagccctacctgctgacccaccccagcgaccccctggagctggtggtgtctggccccagcggcggccccagcagccccaccaccggccccaccagcaccagcgctggccctgaggaccagcccctgacccccaccggcagtgacccccagagcggcctgggccgccacctgggcgtggtgattggcatcctggtggccgtcatcctgctgctgctgctgctgctgctgctcttcctgatcctgcggcaccggcggcagggcaagcactggaccagcacccagaggaaggctgacttccagcaccctgctggagctgtgggccctgagcccacagaccggggcctgcagtggaggagcagccctgctgctgatgcccaggaggagaacctgtatgctgctgtgaagcacacccagccagaagatggagtggagatggacaccaggagcccccatgatgaggacccccaggccgtgacctacgccgaggtgaagcacagccggccccggcgggagatggccagcccccccagccccctgtctggagagttcctggacaccaaggaccggcaggccgaggaggaccggcagatggacacagaggccgccgccagcgaggccccccaggatgtgacctacgcccagctgcacagcctgaccctgcggcgggaggccacagagcccccacccagccaggagggccccagccctgctgtgcccagcatctatgccaccctggccatccactag

SEQ ID NO: 345777 - DNA, 1956 bp, Artificial Sequence
  derived and/or modified sequence
atgacccccatcctgactgtgctgatctgcctgggcctgagcctgggccccaggacccacgtgcaggccggccacctgcccaagcccaccctgtgggccgagcccggcagcgtcatcacccagggcagccctgtgaccctgcgctgccagggcggccaggagacccaggagtaccgcctgtaccgggagaagaagacagccctgtggatcacccgcatcccccaggagctggtgaagaagggccagttccccatccccagcatcacctgggagcacgccggccgctaccgctgctactacggcagtgacacagctggccgctctgagagcagtgaccccctggagctggtggtgactggagcctacatcaagcccaccctgagcgcccagcccagccctgtggtgaacagcggcggcaatgtcatcctgcagtgtgacagccaggtggcctttgatggcttcagcctgtgcaaggagggagaagatgagcacccccagtgcctgaacagccagccccacgcccggggcagcagccgggccatcttctctgtgggccctgtgagccccagccgccgctggtggtaccgctgctacgcctatgacagcaacagcccctatgagtggagcctgcccagcgacctgctggagctgctggtgctgggcgtgtccaagaagcccagcctgtctgtgcagcccggccccatcgtggcccctgaggagaccctgaccctgcagtgtggcagtgatgctggctacaacagatttgtgctgtacaaggatggagagcgggacttcctgcagctggccggggcccagccccaggccggcctgagccaggccaacttcaccctgggccctgtgagccgctcctatggaggccagtaccgctgctacggggcccacaacctgagcagcgagtggagcgcccccagcgaccccctggacatcctgattgctggccagttctatgacagagtgtccctgtctgtgcagcccggccccaccgtggccagcggggagaatgtgaccctgctgtgccagagccagggctggatgcagaccttcctgctgaccaaggagggcgctgctgatgacccctggaggctgcggagcacctaccagagccagaagtaccaggccgagttccccatgggccctgtgaccagcgcccacgccggcacctaccgctgctacggcagccagagcagcaagccctacctgctgacccaccccagcgaccccctggagctggtggtgtctggccccagcggcggccccagcagccccaccaccggccccaccagcaccagcggccctgaggaccagcccctgacccccactggaagtgacccccagagcggcctgggccgccacctgggcgtggtgattggcatcctggtggccgtcatcctgctgctgctgctgctgctgctgctcttcctgatcctgcggcaccggcggcagggcaagcactggaccagcacccagaggaaggctgacttccagcaccctgctggagctgtgggccctgagcccacagaccggggcctgcagtggaggagcagccctgctgctgatgcccaggaggagaacctgtatgctgctgtgaagcacacccagccagaagatggagtggagatggacacccggcagagcccccatgatgaggacccccaggccgtgacctacgccgaggtgaagcacagccggccccggcgggagatggccagcccccccagccccctgtctggagagttcctggacaccaaggaccggcaggccgaggaggaccggcagatggacacagaggccgccgccagcgaggccccccaggatgtgacctacgcccagctgcacagcctgaccctgcggcgggaggccacagagcccccacccagccaggagggccccagccctgctgtgcccagcatctatgccaccctggccatccactag

SEQ ID NO: 345778 - DNA, 1959 bp, Artificial Sequence
  derived and/or modified sequence
atgacccccatcctgactgtgctgatctgcctgggcctgagcctgggccccaggacccacgtgcaggccggccacctgcccaagcccaccctgtgggccgagcccggcagcgtcatcacccagggcagccctgtgaccctgcgctgccagggcggccaggagacccaggagtaccgcctgtaccgggagaagaagacagccctgtggatcacccgcatcccccaggagctggtgaagaagggccagttccccatccccagcatcacctgggagcacgccggccgctaccgctgctactacggcagtgacacagctggccgctctgagagcagtgaccccctggagctggtggtgactggagcctacatcaagcccaccctgagcgcccagcccagccctgtggtgaacagcggcggcaatgtcatcctgcagtgtgacagccaggtggcctttgatggcttcagcctgtgcaaggagggagaagatgagcacccccagtgcctgaacagccagccccacgcccggggcagcagccgggccatcttctctgtgggccctgtgagccccagccgccgctggtggtaccgctgctacgcctatgacagcaacagcccctatgagtggagcctgcccagcgacctgctggagctgctggtgctgggcgtgtccaagaagcccagcctgtctgtgcagcccggccccatcgtggcccctgaggagaccctgaccctgcagtgtggcagtgatgctggctacaacagatttgtgctgtacaaggatggagagcgggacttcctgcagctggccggggcccagccccaggccggcctgagccaggccaacttcaccctgggccctgtgagccgctcctatggaggccagtaccgctgctacggggcccacaacctgagcagcgagtggagcgcccccagcgaccccctggacatcctgattgctggccagttctatgacagagtgtccctgtctgtgcagcccggccccaccgtggccagcggggagaatgtgaccctgctgtgccagagccagggctggatgcagaccttcctgctgaccaaggagggcgctgctgatgacccctggaggctgcggagcacctaccagagccagaagtaccaggccgagttccccatgggccctgtgaccagcgcccacgccggcacctaccgctgctacggcagccagagcagcaagccctacctgctgacccaccccagcgaccccctggagctggtggtgtctggccccagcggcggccccagcagccccaccaccggccccaccagcaccagcgctggccctgaggaccagcccctgacccccaccggcagtgacccccagagcggcctgggccgccacctgggcgtggtgattggcatcctggtggccgtcatcctgctgctgctgctgctgctgctgctcttcctgatcctgcggcaccggcggcagggcaagcactggaccagcacccagaggaaggctgacttccagcaccctgctggagctgtgggccctgagcccacagaccggggcctgcagtggaggagcagccctgctgctgatgcccaggaggagaacctgtatgctgctgtgaagcacacccagccagaagatggagtggagatggacacccggcagagcccccatgatgaggacccccaggccgtgacctatgcagaggtgaagcacagccggccccggcgggagatggccagcccccccagccccctgagcggggagttcctggacaccaaggaccggcaggccgaggaggaccggcagatggacacagaagctgctgccagcgaggccccccaggatgtgacctacgcccagctgcacagcctgaccctgcggcgggaggccacagagcccccacccagccaggagggccccagccctgctgtgcccagcatctatgccaccctggccatccactag

SEQ ID NO: 345779 - DNA, 2878 bp, Artificial Sequence
  derived and/or modified sequence
ggggactatttggttgaaagaaaacccacaatccagtgtcaagaaagaagtcaacttttcttccctatttccctgcatttctcttctgtgctcgctgccacacgcagctcagcctgggcggcacagccagatgcgagatgcgtctctgctgatctgagtctgcctgcagcatggacctgggtcttccctgaagcatctccagggctggagggacgactgccatgcaccgagggctcatccatccacagagcagggcagtgggaggagacgccatgacccccatcctcacggtcctgatctgtctcgggctgagtctgggccccaggacccacgtgcaggcagggcacctccccaagcccaccctctgggctgaaccaggctctgtgatcacccaggggagtcctgtgaccctcaggtgtcaggggggccaggagacccaggagtaccgtctatatagagaaaagaaaacagcactctggattacacggatcccacaggagcttgtgaagaagggccagttccccatcccatccatcacctgggaacatgcagggcggtatcgctgttactatggtagcgacactgcaggccgctcagagagcagtgaccccctggagctggtggtgacaggagcctacatcaaacccaccctctcagcccagcccagccccgtggtgaactcaggagggaatgtaatcctccagtgtgactcacaggtggcatttgatggcttcagtctgtgtaaggaaggagaagatgaacacccacaatgcctgaactcccagccccatgcccgtgggtcgtcccgcgccatcttctccgtgggccccgtgagcccgagtcgcaggtggtggtacaggtgctatgcttatgactcgaactctccctatgagtggtctctacccagtgatctcctggagctcctggtcctaggtgtttctaagaagccatcactctcagtgcagccaggtcctatcgtggcccctgaggagaccctgactctgcagtgtggctctgatgctggctacaacagatttgttctgtataaggacggggaacgtgacttccttcagctcgctggcgcacagccccaggctgggctctcccaggccaacttcaccctgggccctgtgagccgctcctacgggggccagtacagatgctacggtgcacacaacctctcctccgagtggtcggcccccagcgaccccctggacatcctgatcgcaggacagttctatgacagagtctccctctcggtgcagccgggccccacggtggcctcaggagagaacgtgaccctgctgtgtcagtcacagggatggatgcaaactttccttctgaccaaggagggggcagctgatgacccatggcgtctaagatcaacgtaccaatctcaaaaataccaggctgaattccccatgggtcctgtgacctcagcccatgcggggacctacaggtgctacggctcacagagctccaaaccctacctgctgactcaccccagtgaccccctggagctcgtggtctcaggaccgtctgggggccccagctccccgacaacaggccccacctccacatctgcaggccctgaggaccagcccctcacccccaccgggtcggatccccagagtggtctgggaaggcacctgggggttgtgatcggcatcttggtggccgtcatcctactgctcctcctcctcctcctcctcttcctcatcctccgacatcgacgtcagggcaaacactggacatcgacccagagaaaggctgatttccaacatcctgcaggggctgtggggccagagcccacagacagaggcctgcagtggaggtccagcccagctgccgatgcccaggaagaaaacctctatgctgccgtgaagcacacacagcctgaggatggggtggagatggacactcggagcccacacgatgaagacccccaggcagtgacgtatgccgaggtgaaacactccagacctaggagagaaatggcctctcctccttccccactgtctggggaattcctggacacaaaggacagacaggcggaagaggacaggcagatggacactgaggctgctgcatctgaagccccccaggatgtgacctacgcccagctgcacagcttgaccctcagacgggaggcaactgagcctcctccatcccaggaagggccctctccagctgtgcccagcatctacgccactctggccatccactagcccagggggggacgcagaccccacactccatggagtctggaatgcatgggagctgcccccccagtggacaccattggaccccacccagcctggatctaccccaggagactctgggaacttttaggggtcactcaattctgcagtataaataactaatgtctctacaattttgaaataaagcaacagacttctcaataatcaatgaagtagctgagaaaactaagtcagaaagtgcattaaactgaatcacaatgtaaatattacacatcaagcgatgaaactggaaaactacaagccacgaatgaatgaattaggaaagaaaaaaagtaggaaatgaatgatcttggctttcctataagaaatttagggcagggcacggtggctcacgcctgtaattccagcactttgggaggccgaggcgggcagatcacgagttcaggagatcgagaccatcttggccaacatggtgaaaccctgtctctcctaaaaatacaaaaattagctggatgtggtggcagtgcctgtaatcccagctatttgggaggctgaggcaggagaatcgcttgaaccagggagtcagaggtttcagtgagccaagatcgcaccactgctctccagcctggcgacagagggagactccatctcaaatt

SEQ ID NO: 345780 - DNA, 2776 bp, Artificial Sequence
  derived and/or modified sequence
cgcagctcagcctgggcggcacagccagatgcgagatgcgtctctgctgatctgagtctgcctgcagcatggacctgggtcttccctgaagcatctccagggctggagggacgactgccatgcaccgagggctcatccatccacagagcagggcagtgggaggagacgccatgacccccatcctcacggtcctgatctgtctcgggctgagtctgggccccaggacccacgtgcaggcagggcacctccccaagcccaccctctgggctgaaccaggctctgtgatcacccaggggagtcctgtgaccctcaggtgtcaggggggccaggagacccaggagtaccgtctatatagagaaaagaaaacagcactctggattacacggatcccacaggagcttgtgaagaagggccagttccccatcccatccatcacctgggaacatgcagggcggtatcgctgttactatggtagcgacactgcaggccgctcagagagcagtgaccccctggagctggtggtgacaggagcctacatcaaacccaccctctcagcccagcccagccccgtggtgaactcaggagggaatgtaatcctccagtgtgactcacaggtggcatttgatggcttcagtctgtgtaaggaaggagaagatgaacacccacaatgcctgaactcccagccccatgcccgtgggtcgtcccgcgccatcttctccgtgggccccgtgagcccgagtcgcaggtggtggtacaggtgctatgcttatgactcgaactctccctatgagtggtctctacccagtgatctcctggagctcctggtcctaggtgtttctaagaagccatcactctcagtgcagccaggtcctatcgtggcccctgaggagaccctgactctgcagtgtggctctgatgctggctacaacagatttgttctgtataaggacggggaacgtgacttccttcagctcgctggcgcacagccccaggctgggctctcccaggccaacttcaccctgggccctgtgagccgctcctacgggggccagtacagatgctacggtgcacacaacctctcctccgagtggtcggcccccagcgaccccctggacatcctgatcgcaggacagttctatgacagagtctccctctcggtgcagccgggccccacggtggcctcaggagagaacgtgaccctgctgtgtcagtcacagggatggatgcaaactttccttctgaccaaggagggggcagctgatgacccatggcgtctaagatcaacgtaccaatctcaaaaataccaggctgaattccccatgggtcctgtgacctcagcccatgcggggacctacaggtgctacggctcacagagctccaaaccctacctgctgactcaccccagtgaccccctggagctcgtggtctcaggaccgtctgggggccccagctccccgacaacaggccccacctccacatctggccctgaggaccagcccctcacccccaccgggtcggatccccagagtggtctgggaaggcacctgggggttgtgatcggcatcttggtggccgtcatcctactgctcctcctcctcctcctcctcttcctcatcctccgacatcgacgtcagggcaaacactggacatcgacccagagaaaggctgatttccaacatcctgcaggggctgtggggccagagcccacagacagaggcctgcagtggaggtccagcccagctgccgatgcccaggaagaaaacctctatgctgccgtgaagcacacacagcctgaggatggggtggagatggacactcggcagagcccacacgatgaagacccccaggcagtgacgtatgccgaggtgaaacactccagacctaggagagaaatggcctctcctccttccccactgtctggggaattcctggacacaaaggacagacaggcggaagaggacaggcagatggacactgaggctgctgcatctgaagccccccaggatgtgacctacgcccagctgcacagcttgaccctcagacgggaggcaactgagcctcctccatcccaggaagggccctctccagctgtgcccagcatctacgccactctggccatccactagcccagggggggacgcagaccccacactccatggagtctggaatgcatgggagctgcccccccagtggacaccattggaccccacccagcctggatctaccccaggagactctgggaacttttaggggtcactcaattctgcagtataaataactaatgtctctacaattttgaaataaagcaacagacttctcaataatcaatgaagtagctgagaaaactaagtcagaaagtgcattaaactgaatcacaatgtaaatattacacatcaagcgatgaaactggaaaactacaagccacgaatgaatgaattaggaaagaaaaaaagtaggaaatgaatgatcttggctttcctataagaaatttagggcagggcacggtggctcacgcctgtaattccagcactttgggaggccgaggcgggcagatcacgagttcaggagatcgagaccatcttggccaacatggtgaaaccctgtctctcctaaaaatacaaaaattagctggatgtggtggcagtgcctgtaatcccagctatttgggaggctgaggcaggagaatcgcttgaaccagggagtcagaggtttcagtgagccaagatcgcaccactgctctccagcctggcgacagagggagactccatctcaaatt

SEQ ID NO: 345781 - DNA, 2834 bp, Artificial Sequence
  derived and/or modified sequence
aagtcaacttttcttccctatttccctgcatttctcttctgtgctcgctgccacacgcagctcagcctgggcggcacagccagatgcgagatgcgtctctgctgatctgagtctgcctgcagcatggacctgggtcttccctgaagcatctccagggctggagggacgactgccatgcaccgagggctcatccatccacagagcagggcagtgggaggagacgccatgacccccatcctcacggtcctgatctgtctcgggctgagtctgggccccaggacccacgtgcaggcagggcacctccccaagcccaccctctgggctgaaccaggctctgtgatcacccaggggagtcctgtgaccctcaggtgtcaggggggccaggagacccaggagtaccgtctatatagagaaaagaaaacagcactctggattacacggatcccacaggagcttgtgaagaagggccagttccccatcccatccatcacctgggaacatgcagggcggtatcgctgttactatggtagcgacactgcaggccgctcagagagcagtgaccccctggagctggtggtgacaggagcctacatcaaacccaccctctcagcccagcccagccccgtggtgaactcaggagggaatgtaatcctccagtgtgactcacaggtggcatttgatggcttcagtctgtgtaaggaaggagaagatgaacacccacaatgcctgaactcccagccccatgcccgtgggtcgtcccgcgccatcttctccgtgggccccgtgagcccgagtcgcaggtggtggtacaggtgctatgcttatgactcgaactctccctatgagtggtctctacccagtgatctcctggagctcctggtcctaggtgtttctaagaagccatcactctcagtgcagccaggtcctatcgtggcccctgaggagaccctgactctgcagtgtggctctgatgctggctacaacagatttgttctgtataaggacggggaacgtgacttccttcagctcgctggcgcacagccccaggctgggctctcccaggccaacttcaccctgggccctgtgagccgctcctacgggggccagtacagatgctacggtgcacacaacctctcctccgagtggtcggcccccagcgaccccctggacatcctgatcgcaggacagttctatgacagagtctccctctcggtgcagccgggccccacggtggcctcaggagagaacgtgaccctgctgtgtcagtcacagggatggatgcaaactttccttctgaccaaggagggggcagctgatgacccatggcgtctaagatcaacgtaccaatctcaaaaataccaggctgaattccccatgggtcctgtgacctcagcccatgcggggacctacaggtgctacggctcacagagctccaaaccctacctgctgactcaccccagtgaccccctggagctcgtggtctcaggaccgtctgggggccccagctccccgacaacaggccccacctccacatctgcaggccctgaggaccagcccctcacccccaccgggtcggatccccagagtggtctgggaaggcacctgggggttgtgatcggcatcttggtggccgtcatcctactgctcctcctcctcctcctcctcttcctcatcctccgacatcgacgtcagggcaaacactggacatcgacccagagaaaggctgatttccaacatcctgcaggggctgtggggccagagcccacagacagaggcctgcagtggaggtccagcccagctgccgatgcccaggaagaaaacctctatgctgccgtgaagcacacacagcctgaggatggggtggagatggacactcggcagagcccacacgatgaagacccccaggcagtgacgtatgccgaggtgaaacactccagacctaggagagaaatggcctctcctccttccccactgtctggggaattcctggacacaaaggacagacaggcggaagaggacaggcagatggacactgaggctgctgcatctgaagccccccaggatgtgacctacgcccagctgcacagcttgaccctcagacgggaggcaactgagcctcctccatcccaggaagggccctctccagctgtgcccagcatctacgccactctggccatccactagcccagggggggacgcagaccccacactccatggagtctggaatgcatgggagctgcccccccagtggacaccattggaccccacccagcctggatctaccccaggagactctgggaacttttaggggtcactcaattctgcagtataaataactaatgtctctacaattttgaaataaagcaacagacttctcaataatcaatgaagtagctgagaaaactaagtcagaaagtgcattaaactgaatcacaatgtaaatattacacatcaagcgatgaaactggaaaactacaagccacgaatgaatgaattaggaaagaaaaaaagtaggaaatgaatgatcttggctttcctataagaaatttagggcagggcacggtggctcacgcctgtaattccagcactttgggaggccgaggcgggcagatcacgagttcaggagatcgagaccatcttggccaacatggtgaaaccctgtctctcctaaaaatacaaaaattagctggatgtggtggcagtgcctgtaatcccagctatttgggaggctgaggcaggagaatcgcttgaaccagggagtcagaggtttcagtgagccaagatcgcaccactgctctccagcctggcgacagagggagactccatctcaaatt

SEQ ID NO: 345782 - DNA, 2960 bp, Artificial Sequence
  derived and/or modified sequence
gagaaaagaggagaggagaggaggaacagaaaagaaaagaaaagaaaaagtgggaaacaaataatctaagaatgaggagaaagcaagaagagtgacccccttgtgggcactccattggttttatggcgcctctactttctggagtttgtgtaaaacaaaaatattatggtctttgtgcacatttacatcaagctcagcctgggcggcacagccagatgcgagatgcgtctctgctgatctgagtctgcctgcagcatggacctgggtcttccctgaagcatctccagggctggagggacgactgccatgcaccgagggctcatccatccacagagcagggcagtgggaggagacgccatgacccccatcctcacggtcctgatctgtctcgggctgagtctgggccccaggacccacgtgcaggcagggcacctccccaagcccaccctctgggctgaaccaggctctgtgatcacccaggggagtcctgtgaccctcaggtgtcaggggggccaggagacccaggagtaccgtctatatagagaaaagaaaacagcactctggattacacggatcccacaggagcttgtgaagaagggccagttccccatcccatccatcacctgggaacatgcagggcggtatcgctgttactatggtagcgacactgcaggccgctcagagagcagtgaccccctggagctggtggtgacaggagcctacatcaaacccaccctctcagcccagcccagccccgtggtgaactcaggagggaatgtaatcctccagtgtgactcacaggtggcatttgatggcttcagtctgtgtaaggaaggagaagatgaacacccacaatgcctgaactcccagccccatgcccgtgggtcgtcccgcgccatcttctccgtgggccccgtgagcccgagtcgcaggtggtggtacaggtgctatgcttatgactcgaactctccctatgagtggtctctacccagtgatctcctggagctcctggtcctaggtgtttctaagaagccatcactctcagtgcagccaggtcctatcgtggcccctgaggagaccctgactctgcagtgtggctctgatgctggctacaacagatttgttctgtataaggacggggaacgtgacttccttcagctcgctggcgcacagccccaggctgggctctcccaggccaacttcaccctgggccctgtgagccgctcctacgggggccagtacagatgctacggtgcacacaacctctcctccgagtggtcggcccccagcgaccccctggacatcctgatcgcaggacagttctatgacagagtctccctctcggtgcagccgggccccacggtggcctcaggagagaacgtgaccctgctgtgtcagtcacagggatggatgcaaactttccttctgaccaaggagggggcagctgatgacccatggcgtctaagatcaacgtaccaatctcaaaaataccaggctgaattccccatgggtcctgtgacctcagcccatgcggggacctacaggtgctacggctcacagagctccaaaccctacctgctgactcaccccagtgaccccctggagctcgtggtctcaggaccgtctgggggccccagctccccgacaacaggccccacctccacatctggccctgaggaccagcccctcacccccaccgggtcggatccccagagtggtctgggaaggcacctgggggttgtgatcggcatcttggtggccgtcatcctactgctcctcctcctcctcctcctcttcctcatcctccgacatcgacgtcagggcaaacactggacatcgacccagagaaaggctgatttccaacatcctgcaggggctgtggggccagagcccacagacagaggcctgcagtggaggtccagcccagctgccgatgcccaggaagaaaacctctatgctgccgtgaagcacacacagcctgaggatggggtggagatggacactcggagcccacacgatgaagacccccaggcagtgacgtatgccgaggtgaaacactccagacctaggagagaaatggcctctcctccttccccactgtctggggaattcctggacacaaaggacagacaggcggaagaggacaggcagatggacactgaggctgctgcatctgaagccccccaggatgtgacctacgcccagctgcacagcttgaccctcagacgggaggcaactgagcctcctccatcccaggaagggccctctccagctgtgcccagcatctacgccactctggccatccactagcccagggggggacgcagaccccacactccatggagtctggaatgcatgggagctgcccccccagtggacaccattggaccccacccagcctggatctaccccaggagactctgggaacttttaggggtcactcaattctgcagtataaataactaatgtctctacaattttgaaataaagcaacagacttctcaataatcaatgaagtagctgagaaaactaagtcagaaagtgcattaaactgaatcacaatgtaaatattacacatcaagcgatgaaactggaaaactacaagccacgaatgaatgaattaggaaagaaaaaaagtaggaaatgaatgatcttggctttcctataagaaatttagggcagggcacggtggctcacgcctgtaattccagcactttgggaggccgaggcgggcagatcacgagttcaggagatcgagaccatcttggccaacatggtgaaaccctgtctctcctaaaaatacaaaaattagctggatgtggtggcagtgcctgtaatcccagctatttgggaggctgaggcaggagaatcgcttgaaccagggagtcagaggtttcagtgagccaagatcgcaccactgctctccagcctggcgacagagggagactccatctcaaatt

SEQ ID NO: 345783 - DNA, 2828 bp, Artificial Sequence
  derived and/or modified sequence
aagtcaacttttcttccctatttccctgcatttctcttctgtgctcgctgccacacgcagctcagcctgggcggcacagccagatgcgagatgcgtctctgctgatctgagtctgcctgcagcatggacctgggtcttccctgaagcatctccagggctggagggacgactgccatgcaccgagggctcatccatccacagagcagggcagtgggaggagacgccatgacccccatcctcacggtcctgatctgtctcgggctgagtctgggccccaggacccacgtgcaggcagggcacctccccaagcccaccctctgggctgaaccaggctctgtgatcacccaggggagtcctgtgaccctcaggtgtcaggggggccaggagacccaggagtaccgtctatatagagaaaagaaaacagcactctggattacacggatcccacaggagcttgtgaagaagggccagttccccatcccatccatcacctgggaacatgcagggcggtatcgctgttactatggtagcgacactgcaggccgctcagagagcagtgaccccctggagctggtggtgacaggagcctacatcaaacccaccctctcagcccagcccagccccgtggtgaactcaggagggaatgtaatcctccagtgtgactcacaggtggcatttgatggcttcagtctgtgtaaggaaggagaagatgaacacccacaatgcctgaactcccagccccatgcccgtgggtcgtcccgcgccatcttctccgtgggccccgtgagcccgagtcgcaggtggtggtacaggtgctatgcttatgactcgaactctccctatgagtggtctctacccagtgatctcctggagctcctggtcctaggtgtttctaagaagccatcactctcagtgcagccaggtcctatcgtggcccctgaggagaccctgactctgcagtgtggctctgatgctggctacaacagatttgttctgtataaggacggggaacgtgacttccttcagctcgctggcgcacagccccaggctgggctctcccaggccaacttcaccctgggccctgtgagccgctcctacgggggccagtacagatgctacggtgcacacaacctctcctccgagtggtcggcccccagcgaccccctggacatcctgatcgcaggacagttctatgacagagtctccctctcggtgcagccgggccccacggtggcctcaggagagaacgtgaccctgctgtgtcagtcacagggatggatgcaaactttccttctgaccaaggagggggcagctgatgacccatggcgtctaagatcaacgtaccaatctcaaaaataccaggctgaattccccatgggtcctgtgacctcagcccatgcggggacctacaggtgctacggctcacagagctccaaaccctacctgctgactcaccccagtgaccccctggagctcgtggtctcaggaccgtctgggggccccagctccccgacaacaggccccacctccacatctggccctgaggaccagcccctcacccccaccgggtcggatccccagagtggtctgggaaggcacctgggggttgtgatcggcatcttggtggccgtcatcctactgctcctcctcctcctcctcctcttcctcatcctccgacatcgacgtcagggcaaacactggacatcgacccagagaaaggctgatttccaacatcctgcaggggctgtggggccagagcccacagacagaggcctgcagtggaggtccagcccagctgccgatgcccaggaagaaaacctctatgctgccgtgaagcacacacagcctgaggatggggtggagatggacactcggagcccacacgatgaagacccccaggcagtgacgtatgccgaggtgaaacactccagacctaggagagaaatggcctctcctccttccccactgtctggggaattcctggacacaaaggacagacaggcggaagaggacaggcagatggacactgaggctgctgcatctgaagccccccaggatgtgacctacgcccagctgcacagcttgaccctcagacgggaggcaactgagcctcctccatcccaggaagggccctctccagctgtgcccagcatctacgccactctggccatccactagcccagggggggacgcagaccccacactccatggagtctggaatgcatgggagctgcccccccagtggacaccattggaccccacccagcctggatctaccccaggagactctgggaacttttaggggtcactcaattctgcagtataaataactaatgtctctacaattttgaaataaagcaacagacttctcaataatcaatgaagtagctgagaaaactaagtcagaaagtgcattaaactgaatcacaatgtaaatattacacatcaagcgatgaaactggaaaactacaagccacgaatgaatgaattaggaaagaaaaaaagtaggaaatgaatgatcttggctttcctataagaaatttagggcagggcacggtggctcacgcctgtaattccagcactttgggaggccgaggcgggcagatcacgagttcaggagatcgagaccatcttggccaacatggtgaaaccctgtctctcctaaaaatacaaaaattagctggatgtggtggcagtgcctgtaatcccagctatttgggaggctgaggcaggagaatcgcttgaaccagggagtcagaggtttcagtgagccaagatcgcaccactgctctccagcctggcgacagagggagactccatctcaaatt

SEQ ID NO: 345784 - DNA, 1956 bp, Artificial Sequence
  derived and/or modified sequence
atgacccccatcctgaccgtgctgatctgcctgggcctgagcctgggaccacgtacacatgtccaagcggggcatctccctaagcccaccctgtgggcagaaccaggctcagtcatcactcaggggagtcccgtgacattgaggtgtcagggtggtcaggagacccaggaatacagactgtatcgcgagaaaaagacagctctgtggattactcgaattcctcaggagctggtgaagaagggccaattccctatacctagcataacatgggaacacgcaggcagatatcgctgctactacggatccgatacagctggacgctcagagtccagtgacccattagaactcgttgtgacaggagcctacattaaaccaaccctcagcgcccagccttcacccgtggttaactccggtggaaatgttattctccagtgtgactctcaggtcgccttcgacggatttagtctctgcaaagaaggtgaggacgagcatcctcagtgtctgaactcccagccacacgctcggggttcttctcgggcgattttctcagtcggccctgtctccccatcccgccgatggtggtatagatgctacgcttacgactcaaatagtccgtacgaatggagcctgccctccgatctgctcgagctattggtgttaggggtctccaagaagccctccctgtccgtccagccagggcccatagtggcccctgaagaaaccttgacactgcagtgtggaagtgacgcagggtacaatcgtttcgtgctgtataaggacggggagagagattttttgcaacttgccggagcccagccacaggctggcctcagccaggctaattttaccctggggccggtgtctcggtcctacggggggcagtatcgttgttacggggctcacaatctatcctcggaatggtcagctcctagcgacccactggatatcctaattgccgggcaattctatgatcgggtctccctatctgtccagcccgggcccacggtggctagcggcgagaacgtcacactgctgtgtcagagccagggctggatgcagaccttcctcctcaccaaggaaggtgcagctgacgatccatggcggcttaggagcacgtatcagagtcaaaaatatcaggctgagttccctatggggccggttacgtctgcccacgctggcacatacaggtgttatggcagccagtcctccaaaccgtacctgcttacccatcctagtgatcccttagagctggtggttagcggcccttcaggcgggccaagcagtccaactacgggaccaacctcaaccagcgctgggcctgaggaccagcccctgacaccaaccggatcggacccacagtctggtctggggaggcaccttggtgtggtaattggcatcctggtggctgttattctcctgttgctgctccttcttctcctattcctcatcctgcgccaccgacggcaagggaagcactggaccagcacacaacggaaggctgattttcagcatcccgccggagctgtgggccccgagccaaccgacaggggtttacagtggcgaagtagccccgcagctgacgcacaagaagaaaacctctacgccgccgtcaagcatacccagcccgaggacggcgtcgaaatggataccagaagcccacacgatgaggatccccaggcggtaacgtacgctgaagttaaacactcacgacctaggagggagatggcttccccccctagccccctttcaggggaattcctcgacaccaaagacaggcaggcggaggaggataggcaaatggacaccgaggccgccgcgtctgaggctccccaagatgtgacttatgcccagcttcactccctcaccctaagaagggaggcgactgaacctcccccgagtcaggaagggccaagcccggctgtgccaagcatctacgccactcttgccattcactag

SEQ ID NO: 345785 - DNA, 1956 bp, Artificial Sequence
  derived and/or modified sequence
atgacccccatcctgaccgtgctgatctgcctgggcctgagcctgggtcctcgtacacacgtgcaggctggacatctcccaaagcccacactctgggcggagccaggttctgttataacccaaggaagcccggtcacactcagatgtcagggtggacaggagacgcaagaataccgcttatatcgggagaagaaaaccgctctctggattacgcggattcctcaggaactggtcaagaagggccaatttccaattccatctatcacatgggagcacgcaggtagatatagatgctactatggctcagacacagcaggccgctctgaatcttccgacccactcgagctggttgtcaccggtgcttacatcaaacccaccttaagtgcccaaccatccccagtcgttaactcaggggggaatgttatactgcagtgcgattcacaagtggcatttgatggattctcgctgtgtaaggagggagaggatgaacatcctcagtgcctgaattcacagccgcatgccaggggcagctcccgggccattttttccgtggggccggttagtccctctcgtcggtggtggtaccgctgttacgcatacgacagtaactctccatacgaatggagcctgcccagcgatctcttagagctcctggtgctcggtgtgtccaaaaaaccctccttaagcgttcaaccaggtcccattgtggcccccgaggagaccctgacgctgcagtgcggatcagatgcaggctacaatagatttgtgctctacaaggatggcgaacgggatttcctgcaactggcgggcgcgcaaccacaggccggtctgagtcaggctaatttcactctgggccctgtgtctcgatcatatgggggccagtataggtgttacggagcccataacctttcaagtgagtggtcggctccaagcgatcctctcgatattctgatcgctggtcagttttacgatcgcgtgtccttaagtgttcaacccggtcctaccgtcgcctctggggagaacgtaactctcctttgtcaaagccaggggtggatgcagacttttctgctaacaaaggaaggcgcagcggacgatccttggagacttaggagcacatatcaaagccagaaataccaggcggaatttccaatgggaccagttaccagtgcccacgctgggacttatagatgctacggcagccagagctcgaagccttatctccttacccaccccagcgatcctctggagctcgtggtgtccggacctagtggaggcccatcgtctccgactaccggaccaacaagcactagtggcccggaagatcagcctctgaccccaaccggatcggatccacagagcgggctcgggcgacaccttggcgtagtgatcggtatactggttgcagtgatccttctgctcctgctgctccttttgctgttcctgattctacggcaccggcggcagggtaaacactggacctcaactcagaggaaagctgattttcagcaccctgcaggtgcagtgggacccgaacctactgatcggggactgcagtggagaagcagccctgccgctgacgctcaggaagagaatctttatgcagctgtcaagcacacgcagccagaagatggtgtcgaaatggacaccagacaatcaccccacgatgaagaccctcaggccgtgacctacgccgaagtgaaacacagcagaccccgccgcgagatggcctcaccaccaagtcctctttctggcgagtttctagacacaaaggataggcaggccgaggaagatcgtcaaatggacaccgaggcagccgccagcgaggcgccccaagatgtgacctacgcccaactccacagcttgacactgcgaagggaggctacagaacctccacccagtcaggagggcccctctcccgctgtcccctccatttacgccaccctggcaatccactag

SEQ ID NO: 345786 - DNA, 1959 bp, Artificial Sequence
  derived and/or modified sequence
atgacccccatcctgaccgtgctgatctgcctgggcctgagcctgggaccccgtacgcatgtccaggctggccacctgcccaaacctacgctatgggctgagccgggctctgttattactcaggggtctcccgtcaccctgagatgtcagggcggtcaggaaacacaagagtatcgtctgtatcgggagaaaaagaccgccttatggatcactaggattccccaggaactggttaagaagggccaattcccgattccttcaatcacctgggaacacgcaggccgttaccgctgttactacggcagcgacacagccggccgaagcgaatcttctgacccactggagctggtggtaaccggcgcgtacatcaaacctacgctgagcgcacaacctagccccgttgtgaattcaggcggcaatgtcatcctgcaatgcgattcccaggtggcctttgatggcttcagcttatgcaaagaaggcgaagatgagcatccccagtgtctgaattcgcaacctcacgctagagggtctagtagagccatcttctcagtgggacccgtgtcgccgtcgcggaggtggtggtaccggtgttatgcatacgattcaaactcgccctatgagtggtcgctaccctccgatttgctggaactcctggtgctgggggtgagcaagaaaccctcactgtcagtgcaacctggccctatcgtcgcccctgaagagactctgactctgcagtgcggtagcgatgcgggctataaccggtttgtgctgtacaaagacggcgaaagagactttctccagctcgccggcgctcaaccacaagccggactctcccaggcaaacttcacactcggccctgtgtctaggtcgtatggtggacagtacagatgctacggtgcacacaacttaagtagcgaatggtctgccccctcagaccccttggacatcttaatagcgggacagttttacgatcgtgtttctctctccgttcagccagggccaacagtcgcatctggagaaaacgtcaccctgttgtgccagtctcaagggtggatgcaaacatttctgttaaccaaggaaggggctgccgacgatccctggaggctgagatccacctaccagtctcagaaataccaggccgagttcccaatgggacctgtgaccagcgcccacgctggaacgtatcggtgttatggttctcagtcctccaaaccgtacctccttacccacccaagtgaccctctcgaattagtggtctcgggcccatctggcggacctagcagtcccaccactgggcctacatcaacctctgcaggtccagaagaccagcctctcacccccacgggatccgacccccagagcggtctgggtagacatttgggggtggttatcggcatcctggtagcggttattttgctgctgctgctgctgctccttctgtttttaattctgaggcacagacgtcagggcaaacattggaccagcacgcagcgtaaggcagacttccagcatcctgcaggcgctgttggcccagaacccacggaccggggacttcagtggaggtcctccccagcagccgacgctcaggaggagaatctctacgcagccgtcaaacacacccagcccgaggatggggtggaaatggatacgcgtcagagcccacacgacgaggacccccaagcggtcacctatgccgaagtcaagcacagccgacccagaagagagatggcttcacctccctccccgttatccggagaattcctcgacacaaaggatcggcaggcagaagaggatcgccagatggacaccgaggctgccgcaagcgaggctccacaggatgtgacctatgctcagctccactccttgactctcagacgcgaggccactgaacctcctccttctcaggaaggcccctctccggccgtgccgtcaatatacgcgacactagccatacactag

SEQ ID NO: 345787 - DNA, 1956 bp, Artificial Sequence
  derived and/or modified sequence
atgacaccgatactgactgtactcatatgtttgggactttccttagggccacggacccatgttcaagccggtcaccttcctaaacctacgctatgggctgaaccaggaagcgtgattacgcaaggatcccccgtgaccctgaggtgccagggagggcaggagactcaggagtatcggctttacagagaaaagaagaccgctctgtggatcacacggattcctcaagaactggtgaagaaggggcaattcccaatcccgagcattacctgggagcacgccggaagatatcgttgttattacggtagtgacaccgccggaagatccgagagttctgaccctctggaattagtggtgactggagcatatattaaaccgactctaagcgctcagccttctcctgtggtaaacagcggaggaaacgtgatactgcaatgtgacagccaggtggccttcgacggattttctctttgtaaagaaggtgaggatgaacacccccagtgtctgaactcccagcctcatgcacgtgggtcatcacgtgccatcttcagtgttgggcctgtaagcccgagtcgcaggtggtggtaccggtgttatgcatatgatagtaatagcccttatgagtggtctctgccttccgacctacttgagctgctagtgttgggagtttcgaagaaaccatctctgagtgtccaaccaggacctatagtggcgccagaggaaacattaactctgcagtgcggaagcgacgctggctacaaccgctttgtactgtacaaagatggcgaaagagacttcctgcagctggccggagctcagccccaagctggcctgtctcaggcaaatttcacgcttggcccagtgtcacgcagctatggaggacaatacaggtgttatggcgcacataatctttctagtgaatggtccgctccttctgatcccctggacattctgattgccggacagttttacgatcgggtgtccttgagcgtgcagcccggtcccacagtagcgtccggggagaacgtgaccctcttgtgtcagagtcagggctggatgcagacgttcctgcttaccaaagagggagcagctgacgacccatggcggctgagatcaacgtatcagagccagaagtaccaagccgagtttcctatgggcccagtcacctcagcccatgctggcacctaccgctgctatggatcccagtccagcaagccataccttctgacccatccctcggaccccttggagttggtggtctcaggtccttccggagggccaagcagtcccactaccggacctacaagtactagcgctggtccagaagaccaaccactgactcccactggctcagatccccagagtggacttggacggcatttgggggtcgtcatcggcattctggttgcagtcatattgctgctgctgctcctgctgctgctatttctcatactgcgccacaggcgacagggcaagcactggaccagcactcagagaaaggccgatttccaacaccctgctggcgctgtgggaccagagccaactgatcgagggttgcagtggcgttcgtcccccgctgctgatgcccaggaagagaacctgtatgctgcagtgaagcacacccaacctgaggatggcgtagaaatggatacgcgatctcctcacgacgaagacccccaggctgttacttacgctgaggtgaagcattcacgcccacgccgagagatggcttccccgccttcccctctctctggggaatttttggacaccaaagatcggcaggcggaagaagataggcagatggatactgaggccgctgcatccgaggcaccacaggacgtaacatatgctcagctgcattccctgacattacgacgggaggctactgaaccgcctcctagccaggagggtccgtctccagctgtgccctctatatacgcgacactcgccattcactag

SEQ ID NO: 345788 - DNA, 1956 bp, Artificial Sequence
  derived and/or modified sequence
atgactcccatcttgacggtcttgatttgtctcggccttagtctcgggccacgcacccacgtccaagctggccacctgccaaaaccgacactctgggcagagccaggctcagtgatcacccagggaagtcctgtgacgctacggtgccagggtggacaggagacccaggagtaccggctctatcgcgagaaaaaaaccgctctgtggattacccggatccctcaggagctggtgaagaaggggcagtttccgatccctagtatcacatgggagcacgccggtcgatatcgctgctactatggctctgatactgccggaagaagcgaatcttcagacccactcgaactggttgtcactggcgcttatattaagcccaccctgtccgctcagcccagtcctgttgtgaattccggtgggaacgtcattcttcagtgcgattctcaggtcgcctttgatggcttttcactgtgcaaagaaggagaggatgagcatccacagtgcctgaacagccagcctcatgctaggggatctagccgtgccatattctccgtcggaccagtgtcccccagtcggagatggtggtaccgctgctacgcatatgactctaacagcccttacgagtggagtctccctagtgacctgctggaactgctggtgttaggagtaagtaaaaaaccttctttgtcagtgcaaccgggacccatcgttgcgccagaggagacactgactctgcagtgtggaagcgacgcaggctacaacaggtttgtcctctacaaagatggagagcgggatttcctgcagctcgccggagctcagcctcaggccggactaagccaggccaatttcacactcgggccagtgtcacgatcatacgggggacagtaccgctgctatggagcacataatctgagctccgagtggagcgccccttctgaccccctggatattctcatcgccggacaattctacgatcgagtgtctctgtctgtccaacccggacccacagtcgcctccggggaaaatgtaactctattgtgccagtcacagggttggatgcagaccttcttgcttaccaaggagggggctgcagacgacccatggcggcttcggagcacctaccagagccagaaatatcaagccgagttccctatggggcctgtaacaagcgctcatgctggaacttataggtgctacggaagtcagtctagtaaaccttacttgctgactcacccgtctgatcctctagaactggtcgtctctggcccaagcgggggtccctcttctccgacgacgggcccaacttctacatctggtcccgaggatcagcctctgacgccgacggggtccgatccacagagcggcctaggacggcatctcggtgtcgttatcgggatcctagttgctgtgattctgcttctgttgctgctcttacttctctttctgattctgcgtcacagaaggcagggaaagcattggactagcactcagcggaaggcagatttccagcatcctgctggggctgtcggtcccgagccaacggatcgaggccttcaatggcgctcatcccccgcagcggacgcccaggaagaaaatctgtatgccgctgtaaagcatacccagccagaggatggggtagagatggacaccagacaatcaccccacgacgaagaccctcaagccgtaacatatgccgaggttaagcactcgcggcctcgtcgcgagatggcaagcccaccttcacctctgtccggcgaattcctggacaccaaggacaggcaagcggaggaggacaggcaaatggatacggaggccgcagcctctgaggctccacaggatgtcacatacgctcaactacacagtctgactttgcgcagagaagccaccgagccccctcctagccaggagggcccaagccctgctgttccttctatctacgcaaccctggctattcactag

SEQ ID NO: 345789 - DNA, 1959 bp, Artificial Sequence
  derived and/or modified sequence
atgacacctatattgacggttctgatatgtctcggcctgagcctcgggccaagaacccatgtccaggctggtcacctgccgaagccaaccctttgggccgaaccaggctcagtgatcacgcaaggatctccagttacattgcgctgccaaggaggccaggaaactcaggaataccggctctatcgggagaaaaaaaccgcgctgtggatcacccgaataccccaggaattagtgaagaaaggccaattccccatacctagtattacctgggagcacgctggccgttaccgctgttattacgggagcgatacagccggaaggagcgagagttcggatcccttggagctggtggtcacaggcgcttacatcaagccaactctgagcgcccaaccttctcccgtcgtgaattccggcggaaatgtcattctgcagtgtgactcgcaggtagcgttcgatggcttcagcctgtgcaaggagggtgaggatgagcatccacagtgcctcaactcccagccccatgcccgtggaagctccagggctatcttctcagtgggacccgtgtctccatcccgacgctggtggtaccgttgctacgcctatgacagtaacagtccttacgaatggtccctcccatctgatcttttagagttactggtactgggcgtatctaagaaacctagcctttctgtccagccgggaccaatcgtggcccctgaagagacccttaccttacaatgcgggtctgacgccggatataacagattcgtcctgtacaaggacggagagagagattttttgcagttagcaggtgctcagccacaggctgggttatctcaagcgaactttactctgggacctgtgagtaggtcctacggaggccagtacaggtgctacggagcccacaacttaagctcagagtggtcagctccctctgatcccctagatatcctgatcgccggacaattttatgatagggtttctctgagtgtccagcctggccctacagtggcttcaggggaaaatgttaccctcctttgccaatcacagggctggatgcagactttcctccttaccaaggaaggtgccgctgatgacccctggcgcctgcgaagtacataccaatcacagaaatatcaggccgaatttcctatgggcccagtgacctccgctcacgcaggaacgtataggtgttacggcagccagagctctaagccatacctgttgacgcacccttccgaccctctcgaactcgtggtgtcaggtccgagcgggggtccttcatcccccacaacaggtcccaccagtacatctgcaggtcctgaggatcagcctcttacccccaccgggtcggaccctcagtcaggcctcggcagacacctgggagtcgtgataggtattctggtggctgtaatcctcctcctgctcctgttactgctcctgttcctgattctcagacaccggaggcagggaaagcactggacgtctacgcagaggaaggccgatttccaacatcccgctggtgcagtgggccctgagccaactgatcggggtctacaatggcgatccagtcccgctgctgatgctcaggaagagaacctttacgccgctgtgaagcacacccagcccgaggacggggtggaaatggatacaagacagagtccacacgacgaggatccacaggctgtgacctatgccgaggtgaagcattctaggcccagacgagagatggcctcccctccatccccgttgtccggtgagtttttggataccaaggaccgccaggccgaagaggacagacaaatggacacagaggcggcagcatccgaggcgcctcaggacgtgacatacgctcagctccacagtctgactctcagacgcgaggcgactgagcctcctccgtcacaggaaggcccatctccggcagttccttcgatctatgcgaccctggccattcactag

SEQ ID NO: 345790 - DNA, 1956 bp, Artificial Sequence
  derived and/or modified sequence
atgacccccatcctgaccgtgctgatctgcctgggcctgagcctgggccccagaacccacgtgcaggccggccacctgcccaagcccaccctgtgggccgagcccggcagcgtgatcacccagggcagccccgtgaccctgagatgccagggcggccaggagacccaggagtacagactgtacagagagaagaagaccgccctgtggatcaccagaatcccccaggagctggtgaagaagggccagttccccatccccagcatcacctgggagcacgccggcagatacagatgctactacggcagcgacaccgccggcagaagcgagagcagcgaccccctggagctggtggtgaccggcgcctacatcaagcccaccctgagcgcccagcccagccccgtggtgaacagcggcggcaacgtgatcctgcagtgcgacagccaggtggccttcgacggcttcagcctgtgcaaggagggcgaggacgagcacccccagtgcctgaacagccagccccacgccagaggcagcagcagagccatcttcagcgtgggccccgtgagccccagcagaagatggtggtacagatgctacgcctacgacagcaacagcccctacgagtggagcctgcccagcgacctgctggagctgctggtgctgggcgtgagcaagaagcccagcctgagcgtgcagcccggccccatcgtggcccccgaggagaccctgaccctgcagtgcggcagcgacgccggctacaacagattcgtgctgtacaaggacggcgagagagacttcctgcagctggccggcgcccagccccaggccggcctgagccaggccaacttcaccctgggccccgtgagcagaagctacggcggccagtacagatgctacggcgcccacaacctgagcagcgagtggagcgcccccagcgaccccctggacatcctgatcgccggccagttctacgacagagtgagcctgagcgtgcagcccggccccaccgtggccagcggcgagaacgtgaccctgctgtgccagagccagggctggatgcagaccttcctgctgaccaaggagggcgccgccgacgacccctggagactgagaagcacctaccagagccagaagtaccaggccgagttccccatgggccccgtgaccagcgcccacgccggcacctacagatgctacggcagccagagcagcaagccctacctgctgacccaccccagcgaccccctggagctggtggtgagcggccccagcggcggccccagcagccccaccaccggccccaccagcaccagcgccggccccgaggaccagcccctgacccccaccggcagcgacccccagagcggcctgggcagacacctgggcgtggtgatcggcatcctggtggccgtgatcctgctgctgctgctgctgctgctgctgttcctgatcctgagacacagaagacagggcaagcactggaccagcacccagagaaaggccgacttccagcaccccgccggcgccgtgggccccgagcccaccgacagaggcctgcagtggagaagcagccccgccgccgacgcccaggaggagaacctgtacgccgccgtgaagcacacccagcccgaggacggcgtggagatggacaccagaagcccccacgacgaggacccccaggccgtgacctacgccgaggtgaagcacagcagacccagaagagagatggccagcccccccagccccctgagcggcgagttcctggacaccaaggacagacaggccgaggaggacagacagatggacaccgaggccgccgccagcgaggccccccaggacgtgacctacgcccagctgcacagcctgaccctgagaagagaggccaccgagcccccccccagccaggagggccccagccccgccgtgcccagcatctacgccaccctggccatccactag

SEQ ID NO: 345791 - DNA, 1956 bp, Artificial Sequence
  derived and/or modified sequence
atgacccccatcctgaccgtgctgatctgcctgggcctgagcctgggccccagaacccacgtgcaggccggccacctgcccaagcccaccctgtgggccgagcccggcagcgtgatcacccagggcagccccgtgaccctgagatgccagggcggccaggagacccaggagtacagactgtacagagagaagaagaccgccctgtggatcaccagaatcccccaggagctggtgaagaagggccagttccccatccccagcatcacctgggagcacgccggcagatacagatgctactacggcagcgacaccgccggcagaagcgagagcagcgaccccctggagctggtggtgaccggcgcctacatcaagcccaccctgagcgcccagcccagccccgtggtgaacagcggcggcaacgtgatcctgcagtgcgacagccaggtggccttcgacggcttcagcctgtgcaaggagggcgaggacgagcacccccagtgcctgaacagccagccccacgccagaggcagcagcagagccatcttcagcgtgggccccgtgagccccagcagaagatggtggtacagatgctacgcctacgacagcaacagcccctacgagtggagcctgcccagcgacctgctggagctgctggtgctgggcgtgagcaagaagcccagcctgagcgtgcagcccggccccatcgtggcccccgaggagaccctgaccctgcagtgcggcagcgacgccggctacaacagattcgtgctgtacaaggacggcgagagagacttcctgcagctggccggcgcccagccccaggccggcctgagccaggccaacttcaccctgggccccgtgagcagaagctacggcggccagtacagatgctacggcgcccacaacctgagcagcgagtggagcgcccccagcgaccccctggacatcctgatcgccggccagttctacgacagagtgagcctgagcgtgcagcccggccccaccgtggccagcggcgagaacgtgaccctgctgtgccagagccagggctggatgcagaccttcctgctgaccaaggagggcgccgccgacgacccctggagactgagaagcacctaccagagccagaagtaccaggccgagttccccatgggccccgtgaccagcgcccacgccggcacctacagatgctacggcagccagagcagcaagccctacctgctgacccaccccagcgaccccctggagctggtggtgagcggccccagcggcggccccagcagccccaccaccggccccaccagcaccagcggccccgaggaccagcccctgacccccaccggcagcgacccccagagcggcctgggcagacacctgggcgtggtgatcggcatcctggtggccgtgatcctgctgctgctgctgctgctgctgctgttcctgatcctgagacacagaagacagggcaagcactggaccagcacccagagaaaggccgacttccagcaccccgccggcgccgtgggccccgagcccaccgacagaggcctgcagtggagaagcagccccgccgccgacgcccaggaggagaacctgtacgccgccgtgaagcacacccagcccgaggacggcgtggagatggacaccagacagagcccccacgacgaggacccccaggccgtgacctacgccgaggtgaagcacagcagacccagaagagagatggccagcccccccagccccctgagcggcgagttcctggacaccaaggacagacaggccgaggaggacagacagatggacaccgaggccgccgccagcgaggccccccaggacgtgacctacgcccagctgcacagcctgaccctgagaagagaggccaccgagcccccccccagccaggagggccccagccccgccgtgcccagcatctacgccaccctggccatccactag

SEQ ID NO: 345792 - DNA, 1959 bp, Artificial Sequence
  derived and/or modified sequence
atgacccccatcctgaccgtgctgatctgcctgggcctgagcctgggccccagaacccacgtgcaggccggccacctgcccaagcccaccctgtgggccgagcccggcagcgtgatcacccagggcagccccgtgaccctgagatgccagggcggccaggagacccaggagtacagactgtacagagagaagaagaccgccctgtggatcaccagaatcccccaggagctggtgaagaagggccagttccccatccccagcatcacctgggagcacgccggcagatacagatgctactacggcagcgacaccgccggcagaagcgagagcagcgaccccctggagctggtggtgaccggcgcctacatcaagcccaccctgagcgcccagcccagccccgtggtgaacagcggcggcaacgtgatcctgcagtgcgacagccaggtggccttcgacggcttcagcctgtgcaaggagggcgaggacgagcacccccagtgcctgaacagccagccccacgccagaggcagcagcagagccatcttcagcgtgggccccgtgagccccagcagaagatggtggtacagatgctacgcctacgacagcaacagcccctacgagtggagcctgcccagcgacctgctggagctgctggtgctgggcgtgagcaagaagcccagcctgagcgtgcagcccggccccatcgtggcccccgaggagaccctgaccctgcagtgcggcagcgacgccggctacaacagattcgtgctgtacaaggacggcgagagagacttcctgcagctggccggcgcccagccccaggccggcctgagccaggccaacttcaccctgggccccgtgagcagaagctacggcggccagtacagatgctacggcgcccacaacctgagcagcgagtggagcgcccccagcgaccccctggacatcctgatcgccggccagttctacgacagagtgagcctgagcgtgcagcccggccccaccgtggccagcggcgagaacgtgaccctgctgtgccagagccagggctggatgcagaccttcctgctgaccaaggagggcgccgccgacgacccctggagactgagaagcacctaccagagccagaagtaccaggccgagttccccatgggccccgtgaccagcgcccacgccggcacctacagatgctacggcagccagagcagcaagccctacctgctgacccaccccagcgaccccctggagctggtggtgagcggccccagcggcggccccagcagccccaccaccggccccaccagcaccagcgccggccccgaggaccagcccctgacccccaccggcagcgacccccagagcggcctgggcagacacctgggcgtggtgatcggcatcctggtggccgtgatcctgctgctgctgctgctgctgctgctgttcctgatcctgagacacagaagacagggcaagcactggaccagcacccagagaaaggccgacttccagcaccccgccggcgccgtgggccccgagcccaccgacagaggcctgcagtggagaagcagccccgccgccgacgcccaggaggagaacctgtacgccgccgtgaagcacacccagcccgaggacggcgtggagatggacaccagacagagcccccacgacgaggacccccaggccgtgacctacgccgaggtgaagcacagcagacccagaagagagatggccagcccccccagccccctgagcggcgagttcctggacaccaaggacagacaggccgaggaggacagacagatggacaccgaggccgccgccagcgaggccccccaggacgtgacctacgcccagctgcacagcctgaccctgagaagagaggccaccgagcccccccccagccaggagggccccagccccgccgtgcccagcatctacgccaccctggccatccactag

SEQ ID NO: 345793 - protein, 510 aa, Artificial Sequence
  derived and/or modified sequence
MTPILTVLICLGLSLGPRTHVQAGHLPKPTLWAEPGSVITQGSPVTLRCQGGQETQEYRLYREKKTALWITRIPQELVKKGQFPIPSITWEHAGRYRCYYGSDTAGRSESSDPLELVVTGAYIKPTLSAQPSPVVNSGGNVILQCDSQVAFDGFSLCKEGEDEHPQCLNSQPHARGSSRAIFSVGPVSPSRRWWYRCYAYDSNSPYEWSLPSDLLELLVLGVSKKPSLSVQPGPIVAPEETLTLQCGSDAGYNRFVLYKDGERDFLQLAGAQPQAGLSQANFTLGPVSRSYGGQYRCYGAHNLSSEWSAPSDPLDILIAGQFYDRVSLSVQPGPTVASGENVTLLCQSQGWMQTFLLTKEGAADDPWRLRSTYQSQKYQAEFPMGPVTSAHAGTYRCYGSQSSKPYLLTHPSDPLELVVSGPSGGPSSPTTGPTSTSGPEDQPLTPTGSDPQSGLGRHLGVVIGILVAVILLLLLLLLLFLILRHRRQGKHWTSSPAQLPMPRKKTSMLP

SEQ ID NO: 345794 - DNA, 1533 bp, Artificial Sequence
  derived and/or modified sequence
atgacacctattctgacggtccttatctgcctgggcctgagcctgggcccccgtacacacgtgcaggcaggccacttgccaaaacccacactttgggctgaacccggcagcgtgattacacagggctctcccgtgacgcttaggtgtcaggggggccaggaaacgcaggaatatcgcctttacagggagaaaaagaccgcgctgtggattacacgaattccccaggagttagtgaagaaagggcagtttcccataccaagcattacatgggaacatgcgggcaggtatcgctgctattatggaagtgatacagcagggcgctctgagagcagtgaccctctagagctggttgtcacaggcgcctacatcaagcctacactgtctgcacagccttccccagtagtaaactccgggggtaatgttattttacagtgtgattcccaggtagcttttgatggcttctctctgtgtaaagaaggcgaggacgagcacccgcaatgccttaactcgcaaccccacgctcgaggctcttctagagctatcttcagtgtgggacccgtttccccctctagacgatggtggtacaggtgttatgcatacgatagtaatagcccatatgaatggtcactgcctagtgatcttctggagctcctggttctgggcgtcagcaagaaacccagcctctccgtgcaacccggaccaatcgtagctcccgaggagactctcactctacaatgtgggagtgatgctggctacaataggtttgtcctctataaggatggcgagcgtgatttcctgcaactggcaggagctcagccgcaggcgggcttgtctcaggccaatttcacgctgggccctgtgtctcggagctatgggggacaatatcggtgctacggggcccacaatttatcttctgagtggtctgccccaagtgaccccctggatatcctgatcgccggccagttttacgaccgcgtctctctgtctgtccaaccaggccccaccgtggcctcaggtgaaaacgtgactctactgtgccagagccaagggtggatgcagacatttctgttaactaaggaaggtgccgcagatgacccatggagactccgctccacctaccagtcccaaaagtaccaggcagagtttcccatgggccccgttacatccgcccatgcagggacgtaccgctgttacggaagccaaagctctaagccctatctccttacgcacccgtcagatcccttggagctcgtagtgtctgggccttctggcgggcccagtagtccaacgaccggaccaaccagtacgagtggcccagaggatcagccactcacacctacaggttctgatccccaatctggcctgggccgccatctgggagttgtgattggaatcttggtcgccgtgatccttctgctgctcctgctgcttttgctgtttcttattctgagacatcgaaggcagggtaagcactggacgtctagccctgctcagctgccaatgccccgcaagaagacctccatgctgccctag

SEQ ID NO: 345795 - DNA, 1533 bp, Artificial Sequence
  derived and/or modified sequence
atgacccccatcctgactgtgctgatctgcctgggcctgagcctgggccccaggacccacgtgcaggccggccacctgcccaagcccaccctgtgggccgagcccggcagcgtcatcacccagggcagccctgtgaccctgcgctgccagggcggccaggagacccaggagtaccgcctgtaccgggagaagaagacagccctgtggatcacccgcatcccccaggagctggtgaagaagggccagttccccatccccagcatcacctgggagcacgccggccgctaccgctgctactacggcagtgacacagctggccgctctgagagcagtgaccccctggagctggtggtgactggagcctacatcaagcccaccctgagcgcccagcccagccctgtggtgaacagcggcggcaatgtcatcctgcagtgtgacagccaggtggcctttgatggcttcagcctgtgcaaggagggagaagatgagcacccccagtgcctgaacagccagccccacgcccggggcagcagccgggccatcttctctgtgggccctgtgagccccagccgccgctggtggtaccgctgctacgcctatgacagcaacagcccctatgagtggagcctgcccagcgacctgctggagctgctggtgctgggcgtgtccaagaagcccagcctgtctgtgcagcccggccccatcgtggcccctgaggagaccctgaccctgcagtgtggcagtgatgctggctacaacagatttgtgctgtacaaggatggagagcgggacttcctgcagctggccggggcccagccccaggccggcctgagccaggccaacttcaccctgggccctgtgagccgctcctatggaggccagtaccgctgctacggggcccacaacctgagcagcgagtggagcgcccccagcgaccccctggacatcctgattgctggccagttctatgacagagtgtccctgtctgtgcagcccggccccaccgtggccagcggggagaatgtgaccctgctgtgccagagccagggctggatgcagaccttcctgctgaccaaggagggcgctgctgatgacccctggaggctgcggagcacctaccagagccagaagtaccaggccgagttccccatgggccctgtgaccagcgcccacgccggcacctaccgctgctacggcagccagagcagcaagccctacctgctgacccaccccagcgaccccctggagctggtggtgtctggccccagcggcggccccagcagccccaccaccggccccaccagcaccagcggccctgaggaccagcccctgacccccactggaagtgacccccagagcggcctgggccgccacctgggcgtggtgattggcatcctggtggccgtcatcctgctgctgctgctgctgctgctgctcttcctgatcctgcggcaccggcggcagggcaagcactggaccagcagccctgcccagctgcccatgcccaggaagaagacctccatgctgccctag

SEQ ID NO: 345796 - DNA, 2018 bp, Artificial Sequence
  derived and/or modified sequence
atgacccccatcctcacggtcctgatctgtctcgggctgagtctgggccccaggacccacgtgcaggcagggcacctccccaagcccaccctctgggctgaaccaggctctgtgatcacccaggggagtcctgtgaccctcaggtgtcaggggggccaggagacccaggagtaccgtctatatagagaaaagaaaacagcactctggattacacggatcccacaggagcttgtgaagaagggccagttccccatcccatccatcacctgggaacatgcagggcggtatcgctgttactatggtagcgacactgcaggccgctcagagagcagtgaccccctggagctggtggtgacaggagcctacatcaaacccaccctctcagcccagcccagccccgtggtgaactcaggagggaatgtaatcctccagtgtgactcacaggtggcatttgatggcttcagtctgtgtaaggaaggagaagatgaacacccacaatgcctgaactcccagccccatgcccgtgggtcgtcccgcgccatcttctccgtgggccccgtgagcccgagtcgcaggtggtggtacaggtgctatgcttatgactcgaactctccctatgagtggtctctacccagtgatctcctggagctcctggtcctaggtgtttctaagaagccatcactctcagtgcagccaggtcctatcgtggcccctgaggagaccctgactctgcagtgtggctctgatgctggctacaacagatttgttctgtataaggacggggaacgtgacttccttcagctcgctggcgcacagccccaggctgggctctcccaggccaacttcaccctgggccctgtgagccgctcctacgggggccagtacagatgctacggtgcacacaacctctcctccgagtggtcggcccccagcgaccccctggacatcctgatcgcaggacagttctatgacagagtctccctctcggtgcagccgggccccacggtggcctcaggagagaacgtgaccctgctgtgtcagtcacagggatggatgcaaactttccttctgaccaaggagggggcagctgatgacccatggcgtctaagatcaacgtaccaatctcaaaaataccaggctgaattccccatgggtcctgtgacctcagcccatgcggggacctacaggtgctacggctcacagagctccaaaccctacctgctgactcaccccagtgaccccctggagctcgtggtctcaggaccgtctgggggccccagctccccgacaacaggccccacctccacatctggccctgaggaccagcccctcacccccaccgggtcggatccccagagtggtctgggaaggcacctgggggttgtgatcggcatcttggtggccgtcatcctactgctcctcctcctcctcctcctcttcctcatcctccgacatcgacgtcagggcaaacactggacatcgagtccagcccagctgccgatgcccaggaagaaaacctctatgctgccgtgaagcacacacagcctgaggatggggtggagatggacactcggagcccacacgatgaagacccccaggcagtgacgtatgccgaggtgaaacactccagacctaggagagaaatggcctctcctccttccccactgtctggggaattcctggacacaaaggacagacaggcggaagaggacaggcagatggacactgaggctgctgcatctgaagccccccaggatgtgacctacgcccagctgcacagcttgaccctcagacgggaggcaactgagcctcctccatcccaggaagggccctctccagctgtgcccagcatctacgccactctggccatccactagcccagggggggacgcagaccccacactccatggagtctggaatgcatgggagctgcccccccagtggacaccattggaccccacccagcctggatctaccccaggagactctgggaacttttaggggtcactcaattctgc

SEQ ID NO: 345797 - DNA, 1533 bp, Artificial Sequence
  derived and/or modified sequence
atgacccccatcctgaccgtgctgatctgcctgggcctgagcctggggccacgaacacatgtgcaggcgggacatctccccaaacccacactgtgggcagagccgggctctgtaatcacacagggcagcccagtgaccctgagatgccaggggggccaggaaacgcaggagtaccgactgtatagggaaaaaaaaactgccctctggatcacgaggataccccaagaacttgtgaagaagggccagtttccaatcccttctataacctgggagcacgctggtagatatagatgttattatggttcagataccgccggccggtctgagtcgagcgacccattagagctcgtggtaactggagcttatataaaacctaccctctcggcccagcctagtcccgtagtgaattccgggggtaacgtcatcctgcaatgcgactctcaggttgcgtttgacggattctcgctctgtaaagaaggagaagatgagcacccacaatgcctgaattcacagcctcatgcaagaggatccagtagggctatcttctcagttgggcctgtgtcacctagcagaaggtggtggtaccggtgctacgcatacgatagcaatagtccttatgaatggagtctaccctccgacctactggagctccttgtgctaggagtgagcaaaaagccttcccttagcgtccagccaggccctatcgtggcccctgaagaaacactcacacttcaatgcggttccgacgcaggatacaaccgcttcgttctgtataaggacggggagagagactttcttcaattggcgggcgcacagccacaagccggcctctcccaggcaaacttcacgctaggcccagtgtctcgctcatatgggggacaataccggtgctacggggcgcacaatctctccagcgaatggagcgctccctctgatccattggacatcctgatagccggccagttttatgaccgggtatcacttagcgtacagcccgggcctaccgtcgccagcggggagaatgttacactgctgtgccagtcccagggatggatgcaaaccttcttgttgacaaaagagggagcagcggatgatccctggcggttgcgctcgacctaccaatcgcagaaatatcaagccgagttccccatgggcccagtgacgagcgctcacgccggcacctaccgctgctacggctcccagagttccaagccttatctcttgacccacccctctgatccgctggagctcgtcgtcagtgggccatcaggaggcccatctagccctactaccgggcctacaagcacttctggacctgaggaccaacctctcacccctacaggatccgatccgcagtctggattgggaagacatctgggcgttgtcattgggatcctcgtcgccgtcatacttctgctgctcctgctgctcctcctttttttgatcctgcgccaccgccgccagggcaagcattggacctcttctccagcacagctgccaatgcctagaaagaaaacctccatgctcccatag

SEQ ID NO: 345798 - DNA, 1533 bp, Artificial Sequence
  derived and/or modified sequence
atgacaccgattttgaccgttctgatatgcttagggttgagtttaggaccacgcacccatgtccaggccggacacctgcctaagcctactctttgggcagagccaggatccgtgataacccaaggaagtcctgtgaccctcagatgccaaggaggccaagaaacccaggagtacaggttatatcgggagaagaagaccgcactctggatcactcgcatcccccaggaactcgtgaagaagggccagtttccgattccctccatcacgtgggagcatgccggtcggtaccgatgttattatggatcagatacagctgggagatcagaatcctcggacccactcgaactagtggttacaggggcttatataaagcctacactttccgcacaaccatcgcctgtcgtaaattccggcggaaatgttattctccaatgcgactcacaggttgcttttgacgggttttcactttgcaaggagggtgaggatgagcacccccagtgcctaaattcgcagccccatgccagggggtccagtagggcaatttttagtgtggggccagtgtccccatcacgccgatggtggtaccgatgctacgcatatgacagtaacagcccatacgaatggtctctgcccagcgacttgctggagctcctcgttcttggggtgtcaaagaagccttctttgtccgttcaacccggtccaatcgttgcccctgaagaaacgctgaccttgcagtgcgggagcgatgccggatacaatcggttcgttctttacaaggacggtgagagagacttcctgcagctggcgggagcccagccacaggctggactatctcaggctaacttcacccttggcccagtgtctcgcagttatgggggacagtacaggtgttatggggcacacaacctgtcatcagaatggagcgcgccttctgatcccctcgacattctgatagccggacaattctatgatcgcgtctcattgagcgtgcagccaggtcccaccgtcgccagcggcgaaaatgtgactttgctgtgccagagccagggttggatgcagacatttctcctcacaaaagaaggcgcagctgacgacccatggcgcttacgttccacatatcagtcacaaaagtatcaggcggaattcccaatggggcctgtcacctcagcccacgctgggacgtacaggtgttacggctctcaaagttcaaagccttatttgctgactcatccatccgaccccttagagctggttgtttcgggcccatcaggaggcccttccagcccaaccacaggacccaccagtacgagcggccctgaggatcaacctctgacgcccaccggcagtgacccgcagtctggtctgggtcggcacctgggtgttgtcatcggaatactggtcgcggtaattctgctgctcttgctgcttctcttgctttttcttatcctgcgccatcgcaggcaggggaaacactggacctcaagccctgcacaacttccaatgcctaggaaaaagacctccatgctcccctag

SEQ ID NO: 345799 - DNA, 1533 bp, Artificial Sequence
  derived and/or modified sequence
atgacccccatcctgaccgtgctgatctgcctgggcctgagcctgggccccagaacccacgtgcaggccggccacctgcccaagcccaccctgtgggccgagcccggcagcgtgatcacccagggcagccccgtgaccctgagatgccagggcggccaggagacccaggagtacagactgtacagagagaagaagaccgccctgtggatcaccagaatcccccaggagctggtgaagaagggccagttccccatccccagcatcacctgggagcacgccggcagatacagatgctactacggcagcgacaccgccggcagaagcgagagcagcgaccccctggagctggtggtgaccggcgcctacatcaagcccaccctgagcgcccagcccagccccgtggtgaacagcggcggcaacgtgatcctgcagtgcgacagccaggtggccttcgacggcttcagcctgtgcaaggagggcgaggacgagcacccccagtgcctgaacagccagccccacgccagaggcagcagcagagccatcttcagcgtgggccccgtgagccccagcagaagatggtggtacagatgctacgcctacgacagcaacagcccctacgagtggagcctgcccagcgacctgctggagctgctggtgctgggcgtgagcaagaagcccagcctgagcgtgcagcccggccccatcgtggcccccgaggagaccctgaccctgcagtgcggcagcgacgccggctacaacagattcgtgctgtacaaggacggcgagagagacttcctgcagctggccggcgcccagccccaggccggcctgagccaggccaacttcaccctgggccccgtgagcagaagctacggcggccagtacagatgctacggcgcccacaacctgagcagcgagtggagcgcccccagcgaccccctggacatcctgatcgccggccagttctacgacagagtgagcctgagcgtgcagcccggccccaccgtggccagcggcgagaacgtgaccctgctgtgccagagccagggctggatgcagaccttcctgctgaccaaggagggcgccgccgacgacccctggagactgagaagcacctaccagagccagaagtaccaggccgagttccccatgggccccgtgaccagcgcccacgccggcacctacagatgctacggcagccagagcagcaagccctacctgctgacccaccccagcgaccccctggagctggtggtgagcggccccagcggcggccccagcagccccaccaccggccccaccagcaccagcggccccgaggaccagcccctgacccccaccggcagcgacccccagagcggcctgggcagacacctgggcgtggtgatcggcatcctggtggccgtgatcctgctgctgctgctgctgctgctgctgttcctgatcctgagacacagaagacagggcaagcactggaccagcagccccgcccagctgcccatgcccagaaagaagaccagcatgctgccctag

SEQ ID NO: 345800 - protein, 491 aa, Artificial Sequence
  derived and/or modified sequence
MIPTFTALLCLGLSLGPRTHMQAGPLPKPTLWAEPGSVISWGNSVTIWCQGTLEAREYRLDKEESPAPWDRQNPLEPKNKARFSIPSMTEDYAGRYRCYYRSPVGWSQPSDPLELVMTGAYSKPTLSALPSPLVTSGKSVTLLCQSRSPMDTFLLIKERAAHPLLHLRSEHGAQQHQAEFPMSPVTSVHGGTYRCFSSHGFSHYLLSHPSDPLELIVSGSLEDPRPSPTRSVSTAAGPEDQPLMPTGSVPHSGLRRHWEEPKSCDKTHTCPPCPAPELLGGPSVFLFPPKPKDTLMISRTPEVTCVVVDVSHEDPEVKFNWYVDGVEVHNAKTKPREEQYNSTYRVVSVLTVLHQDWLNGKEYKCKVSNKALPAPIEKTISKAKGQPREPQVYTLPPSRDELTKNQVSLTCLVKGFYPSDIAVEWESNGQPENNYKTTPPVLDSDGSFFLYSKLTVDKSRWQQGNVFSCSVMHEALHNHYTQKSLSLSPGK

SEQ ID NO: 345801 - protein, 448 aa, Artificial Sequence
  derived and/or modified sequence
MIPTFTALLCLGLSLGPRTHMQAGPLPKPTLWAEPGSVISWGNSVTIWCQGTLEAREYRLDKEESPAPWDRQNPLEPKNKARFSIPSMTEDYAGRYRCYYRSPVGWSQPSDPLELVMTGAYSKPTLSALPSPLVTSGKSVTLLCQSRSPMDTFLLIKERAAHPLLHLRSEHGAQQHQAEFPMSPVTSVHGGTYRCFSSHGFSHYLLSHPSDPLELIVSGSLEDPRPSPTRSVSTAAGPEDQPLMPTGSVPHSGLRRHWEVLIGVLVVSILLLSLLLFLLLQHWRQGKHRTLAQRQADFQRPPGAAEPEPKDGGLQRRSSPAADVQGENFCAAVKNTQPEDGVEMDTRQSPHDEDPQAVTYAKVKHSRPRREMASPPSPLSGEFLDTKDRQAEEDRQMDTEAAASEAPQDVTYAQLHSFTLRQKATEPPPSQEGASPAEPSVYATLAIH

SEQ ID NO: 345802 - DNA, 1347 bp, Artificial Sequence
  derived and/or modified sequence
atgatcccaacttttacagccctgctgtgcctggggctgagtttaggccctcgtacccacatgcaggctggtcctctgcctaaacctaccctgtgggctgagccagggagcgtgatttcctggggaaactctgtcaccatttggtgtcaagggacacttgaggcccgagagtacaggcttgacaaggaggagtctcctgccccttgggatcggcagaatcccctcgaaccaaaaaataaagcccgattctctattccctccatgacagaagactatgcgggcaggtacagatgttattataggtcccctgtcggatggtcacagccgtcagatcccctcgagttggtcatgaccggagcctactctaagccaactctctctgctttgcccagccctctcgtgacttctggcaaatcagtaaccctcttgtgtcagtctcggtcacctatggacactttcctgctgatcaaggagagagccgcccacccactcctgcatctgcgctctgagcacggggctcagcagcatcaggctgaatttcccatgtctccagtcacctccgtccatggaggcacatataggtgcttctcatcacacgggttcagccactacttactgtcccatccctcagatccgctcgaactaattgtctcagggtctctggaggaccctcgaccatcgcctaccaggagcgtgagtacggccgctggccccgaggaccagccacttatgccgaccggaagcgtgccacactccggccttcggagacactgggaggtcttaatcggcgtgttggtagtaagcattctcctcctgtcgttgttattatttctcttgctgcagcattggcgacaggggaaacatcggactctggctcagcgacaggcagacttccagagaccccctggagccgcagagccagaacccaaagacggaggcctccagcggagatccagccctgccgctgacgtgcagggcgagaacttctgcgccgcggttaaaaacacccagcctgaggatggtgttgagatggatacgaggcagtcaccccacgatgaggatccacaggctgtcacgtacgcaaaagtgaaacactccaggccacgacgcgaaatggccagccccccgtctcccctatctggcgaatttttagacacaaaagacaggcaggccgaggaggatagacagatggacacagaggcggcggcttccgaagcaccacaggacgtaacttacgcccaattgcactcttttactctgcgacagaaggcgacagaaccccctccatcacaggaaggggcctcccctgctgaaccctcggtgtacgccaccctggcgatccattag

SEQ ID NO: 345803 - DNA, 1347 bp, Artificial Sequence
  derived and/or modified sequence
atgattcctacatttaccgctttgttgtgcctcggtctgtctcttggacctaggacccacatgcaggctggtcctctgccaaagccaacgttatgggcagagcctggctctgtgatttcttggggaaactccgttaccatttggtgccagggcacactggaagcaagagagtaccggcttgacaaggaggagagtccagcaccatgggataggcagaatccactcgaacccaagaacaaagcacggttcagcattccgagtatgaccgaggactatgccggtaggtaccggtgttactatagatcaccggtgggctggtctcaaccatctgaccccctagaactggtaatgaccggcgcctattcaaaacctacgctgtcagctctgccctctcctctggtcaccagtgggaagagcgtgacgttgctctgtcagtcaagaagtcctatggacacattcctcttgattaaggaacgggccgctcatccactgcttcatcttcgctcagagcatggagcccagcagcatcaggccgaattccccatgtcaccagtaacctccgtacacggcggcacttaccgctgtttcagctctcacggctttagtcactacctgttatctcatccttccgacccacttgagctgatagtgagcggaagtctggaggatccaaggccaagccccacacgttccgtgagtaccgctgcaggacccgaggatcagcccttgatgcccacagggtctgtgcctcattcaggactgcgaagacattgggaagtgctcatcggcgtactggtcgtatcgattttgcttttgtccttgctcttgttcctgttactacaacactggcgtcagggaaaacaccggacactggctcagcggcaggccgattttcagaggcccccaggcgcagcggaacccgagccaaaagacggtggattgcaaagacgttcaagtccagcggcagacgtgcagggggagaacttttgcgcagcagtaaagaacacccagcccgaggacggggtggaaatggacaccagacagagccctcacgatgaggatcctcaggcggtgacgtacgccaaggtaaaacacagccggccaaggcgggagatggcatctcctccatcaccactgtctggcgagttccttgatacaaaggaccgacaggccgaggaggaccgacagatggacacggaagctgcagcctccgaagcacctcaggatgtgacatatgcacaactacactccttcacccttcgacagaaggcaacagagccccctcctagccaagagggcgcctctcccgctgaaccctctgtttatgctactcttgccattcattag

SEQ ID NO: 345804 - DNA, 1347 bp, Artificial Sequence
  derived and/or modified sequence
atgatccccaccttcaccgccctgctgtgcctgggcctgagcctgggccccaggacccacatgcaggccggccccctgcccaagcccaccctgtgggccgagcccggcagcgtcatctcctggggcaacagcgtgaccatctggtgccagggcaccctggaggcccgggagtaccgcctggacaaggaggagagccctgccccctgggaccggcagaaccccctggagcccaagaacaaggcccgcttcagcatccccagcatgacagaggactatgccggccgctaccgctgctactaccgcagccctgtgggctggagccagcccagcgaccccctggagctggtgatgaccggggcctacagcaagcccaccctgagcgccctgcccagccccctggtgaccagcggcaagtctgtgaccctgctgtgccagagccgcagccccatggacaccttcctgctgatcaaggagcgggccgcccaccccctgctgcacctgcggagtgaacatggagcccagcagcaccaggccgagttccccatgagccctgtgacctctgtgcatggaggcacctaccgctgcttcagcagccacggcttcagccactacctgctgagccaccccagcgaccccctggagctgattgtgtctggcagcctggaggacccccggcccagccccaccaggtctgtgtccacagctgctggccctgaggaccagcccctgatgcccaccggctctgtgccccacagcggcctgcggcggcactgggaggtgctgattggagtgctggtggtgtccatcctgctgctgagcctgctgctcttcctgctgctgcagcactggaggcagggcaagcacaggaccctggcccagaggcaggccgacttccagaggcctcctggagctgctgagcctgagcccaaggatggcggcctgcagaggaggagcagccctgctgctgatgtgcagggcgagaacttctgtgccgctgtgaagaacacccagccagaagatggagtggagatggacacccggcagagcccccatgatgaggacccccaggccgtgacctacgccaaggtgaagcacagccggccccggcgggagatggccagcccccccagccccctgagcggggagttcctggacaccaaggaccggcaggccgaggaggaccggcagatggacacagaagctgctgccagcgaggccccccaggatgtgacctacgcccagctgcacagcttcaccctgcggcagaaggccacagagcccccacccagccaggagggcgccagccctgctgagcccagcgtgtatgccaccctggccatccactag

SEQ ID NO: 345805 - DNA, 2083 bp, Artificial Sequence
  derived and/or modified sequence
cacttgttcaatgatgtacccccagtgtcaggcgctttgcaaacacacgatacatacgggttgatgtttggtcaagagaggaattaagaccaggcagacagcaggctgggatcagagagaccccatttctgtctgaaatgtctgcagagaacctggtgcctgcctcagccctagctctggggaaatgaaagccaggctggggttcaaatgagggcagtttcccttcctgtgggctgctgatggaacaaccccatgacgagaaggacccagcctccaagcggccacaccctgtgtgtctctttgtcctgccggcactgaggactcatccatctgcacagctggggcccctgggaggagacgccatgatccccaccttcacggctctgctctgcctcgggctgagtctgggccccaggacccacatgcaggcagggcccctccccaaacccaccctctgggctgagccaggctctgtgatcagctgggggaactctgtgaccatctggtgtcaggggaccctggaggctcgggagtaccgtctggataaagaggaaagcccagcaccctgggacagacagaacccactggagcccaagaacaaggccagattctccatcccatccatgacagaggactatgcagggagataccgctgttactatcgcagccctgtaggctggtcacagcccagtgaccccctggagctggtgatgacaggagcctacagtaaacccaccctttcagccctgccgagtcctcttgtgacctcaggaaagagcgtgaccctgctgtgtcagtcacggagcccaatggacactttccttctgatcaaggagcgggcagcccatcccctactgcatctgagatcagagcacggagctcagcagcaccaggctgaattccccatgagtcctgtgacctcagtgcacggggggacctacaggtgcttcagctcacacggcttctcccactacctgctgtcacaccccagtgaccccctggagctcatagtctcaggatccttggaggatcccaggccctcacccacaaggtccgtctcaacagctgcaggccctgaggaccagcccctcatgcctacagggtcagtcccccacagtggtctgagaaggcactgggaggtactgatcggggtcttggtggtctccatcctgcttctctccctcctcctcttcctcctcctccaacactggcgtcagggaaaacacaggacattggcccagagacaggctgatttccaacgtcctccaggggctgccgagccagagcccaaggacgggggcctacagaggaggtccagcccagctgctgacgtccagggagaaaacttctgtgctgccgtgaagaacacacagcctgaggacggggtggaaatggacactcggcagagcccacacgatgaagacccccaggcagtgacgtatgccaaggtgaaacactccagacctaggagagaaatggcctctcctccctccccactgtctggggaattcctggacacaaaggacagacaggcagaagaggacagacagatggacactgaggctgctgcatctgaagccccccaggatgtgacctacgcccagctgcacagctttaccctcagacagaaggcaactgagcctcctccatcccaggaaggggcctctccagctgagcccagtgtctatgccactctggccatccactaatccaggggggacccagaccccacaagccatggagactcaggaccccagaaggcatggaagctgcctccagtagacatcactgaaccccagccagcccagacccctgacacagaccactagaagattccgggaacgttgggagtcacctgattctgcaaagataaataatatccctgcattatcaaaataaagtagcagacctctcaattcacaatgagttaactgataaaacaaaacagaagtcagacaatgttttaaattgaatgatcatgtaaatattacacatcaaaccaatgacatgggaaaatgggagcttctaatgaggacaaacaaaaaatagagaaaaattaataaagtcaaaatgtttattcttg

SEQ ID NO: 345806 - DNA, 4002 bp, Artificial Sequence
  derived and/or modified sequence
ggcctgtgggaggcagaatagtgacctcccagagatgtccacctcctgaggcccagaccctcccagggagacccattttggacttgtgacctccgggacgagaacctggtgcctgcctcagccctagctctggggaaatgaaagccaggctggggttcaaatgagggcagtttcccttcctgtgggctgctgatggaacaaccccatgacgagaaggacccagcctccaagcggccacaccctgtgtgtctctttgtcctgccggcactgaggactcatccatctgcacagctggggcccctgggaggagacgccatgatccccaccttcacggctctgctctgcctcgggctgagtctgggccccaggacccacatgcaggcagggcccctccccaaacccaccctctgggctgagccaggctctgtgatcagctgggggaactctgtgaccatctggtgtcaggggaccctggaggctcgggagtaccgtctggataaagaggaaagcccagcaccctgggacagacagaacccactggagcccaagaacaaggccagattctccatcccatccatgacagaggactatgcagggagataccgctgttactatcgcagccctgtaggctggtcacagcccagtgaccccctggagctggtgatgacaggagcctacagtaaacccaccctttcagccctgccgagtcctcttgtgacctcaggaaagagcgtgaccctgctgtgtcagtcacggagcccaatggacactttccttctgatcaaggagcgggcagcccatcccctactgcatctgagatcagagcacggagctcagcagcaccaggctgaattccccatgagtcctgtgacctcagtgcacggggggacctacaggtgcttcagctcacacggcttctcccactacctgctgtcacaccccagtgaccccctggagctcatagtctcaggatccttggaggatcccaggccctcacccacaaggtccgtctcaacagctgcaggccctgaggaccagcccctcatgcctacagggtcagtcccccacagtggtctgagaaggcactgggaggtactgatcggggtcttggtggtctccatcctgcttctctccctcctcctcttcctcctcctccaacactggcgtcagggaaaacacaggacattggcccagagacaggctgatttccaacgtcctccaggggctgccgagccagagcccaaggacgggggcctacagaggaggtccagcccagctgctgacgtccagggagaaaacttctgtgctgccgtgaagaacacacagcctgaggacggggtggaaatggacactcggcagagcccacacgatgaagacccccaggcagtgacgtatgccaaggtgaaacactccagacctaggagagaaatggcctctcctccctccccactgtctggggaattcctggacacaaaggacagacaggcagaagaggacagacagatggacactgaggctgctgcatctgaagccccccaggatgtgacctacgcccagctgcacagctttaccctcagacagaaggcaactgagcctcctccatcccaggaaggggcctctccagctgagcccagtgtctatgccactctggccatccactaatccaggggggacccagaccccacaagccatggagactcaggaccccagaaggcatggaagctgcctccagtagacatcactgaaccccagccagcccagacccctgacacagaccactagaagattccgggaacgttgggagtcacctgattctgcaaagataaataatatccctgcattatcaaaataaagtagcagacctctcaattcacaatgagttaactgataaaacaaaacagaagtcagacaatgttttaaattgaatgatcatgtaaatattacacatcaaaccaatgacatgggaaaatgggagcttctaatgaggacaaacaaaaaatagagaaaaattaataaagtcaaaatgtttattcttgaaaacattaatgatacatgaatcttggccacaatgagaaaaataaaaatgaaaaaagagcaggcatccatttccatacaggaacaaaataggaggcagcactacagaccctacacacagctttacagaggtgaaagaaaactgtcagcaattctatgctgacataacagaaaatgtagatgagatagatgaaatacgaaaaattacagtttacttaatgaacataaggataaatagaaaaactgaatcatcatacataaacatatataaaatgcattgatcctgtaatcaaaaatgttcccacaaagtaaatgccacttcagcaaggtttgttggtggttttttcaaactcttatgcactcatgaaacacacagacacacacacacacaaacttgcataaattttccctgagaatattttgtatatatttacacaaatacatttgatcagactaggaacaagttgataccaaaacctgaaaaggaaactacagaatgggaaagtcatagaagatctctcacagaaatataaatcccttaacaaatattaacaagtaagattcatgtctctataaaatagacagtatatcatgaccacactggttttttgttatcctttgattttgtttatgaaaagcaaggatagcttaattttcaaaaactcaatcaatgtaattcagtattttaacaaaaggaatgaaaaattatcatctcaatagacaaagcttttgtctgagcaccttttcatatagctgctgaccatttgtatgtcttcttttgagaaatgcctgttcagctactttgcccatgtttcaagtagtttttggtttcttgctgttgctttgttttagttccttacatatttttgcatattaaccctttatcaggtatacagcttgcaactattttctcccatttctgagttgtctcttcattctgtttgcagaagctgtttagaagccacaccttttgtctatttttgcttttgttgcttgtgttttcagggccatatccaaaaaaaccttgcccggaccaacgtcttgaagcttttctcccacccatttttgtatatgggataagggttcaatttcattcttcttcatatgaatatccccaggatgtgtcctatgcccagctgcacagcttaccctcaaacagaaaataatgaagccttcttcctcccaggaaaggggacgttcagctgagccgagtgtgtatactgctctggccatccactagcccagggaggacccagacctccacactccatggagactcagttctcctaggaccatttattcaaaaggactgccctctcttgttcttggaaactttgttgaggatcaattcaccataaatatgtgtgtttccttctttgctttcatccctgttgcactgatcactgtacctgtttctattccagttccatgatgtcttcctggctgtagctttgtaggatatttggggattccatagtgtgatatccccttcttccctttgctcaagattgttttggctatttggggtccttttgtagtcccattcaaattttaggattgtttttctatttctgtggaaaacgaccttggaattttgttaggaattgcattgagtctgcaggtatgaacttttttttaaagttccagggcacatgtacaggacctgcagctttgttacataggtaggcttgtgccatggtggtttgctgcacctatcaacccattacctagttattaagcccagcatgcattagctctttttcctgatgctctccctcccttcatcatccgccctcccactacaagccccagtgtgtgttgttcccctccctgtgtccatgtgttctcattgttatacgaacattttaacaatgttaattcttgcagaccatgaacataagctaccttcccatttatatgcgtcttgttcaatttcattcatcaatgttataaagattttagtgcaga

SEQ ID NO: 345807 - DNA, 1347 bp, Artificial Sequence
  derived and/or modified sequence
atgatccccaccttcaccgccctgctgtgcctgggcctgagcctgggcccaaggacccacatgcaggctgggcccctgcctaagccaacactctgggccgaacccggctccgtgatctcttggggcaatagcgttaccatctggtgtcagggtacactggaagctcgcgagtatagacttgacaaagaagagtcgccggccccatgggacagacagaatcctcttgaacccaaaaacaaagcacgcttttctatccctagtatgacggaggattacgccgggagatataggtgttactatcggagtcctgtgggctggtcccagcctagtgatcccttagagctcgtaatgacgggcgcctactctaaacctacattatcagcactgcccagccctctggtcactagtggcaaatccgtgactctactatgccagtctcgctcccctatggacacgttcttgcttatcaaggagagagctgctcacccactgctgcatctccgaagtgagcacggcgcacagcaacatcaggccgaattccccatgtcccctgtgactagtgtgcatggcggcacctaccggtgtttttcttcccatggcttctctcattatctgttatcccaccctagcgatcctctcgaactgattgtctctggctcactggaggacccccggccctcaccaacacgtagtgtcagtacggccgctgggcccgaagatcaacctctgatgccgaccggctctgtgccgcatagtggacttagacgacactgggaggttctgatcggagtgctggtcgtgtcgatcctgctgctttcactgttactattcctgcttctgcagcactggaggcagggaaagcaccggaccctggctcagcggcaagcagactttcaacgccctccaggggctgccgagcccgaacccaaggatggggggttgcaaaggcgctcaagcccagctgctgacgtgcagggtgaaaacttctgtgctgcggtcaagaatacacagccagaagacggtgttgaaatggatacccgacagagtccccacgatgaggacccccaggcagtcacttatgcaaaggtgaagcactcgaggcccagacgggaaatggcctcgcctccctccccattgtctggcgaatttctggatactaaagacagacaagctgaagaggaccggcagatggataccgaagccgctgcgtcagaggcacctcaagacgtgacatatgcgcagctccattccttcaccttaagacagaaagcaacagagcctccgccctcccaggagggcgcatcgccggccgaacctagtgtttatgcaacgctggccatccactag

SEQ ID NO: 345808 - DNA, 1347 bp, Artificial Sequence
  derived and/or modified sequence
atgatccccaccttcaccgccctgctgtgcctgggcctgagcctgggacctaggacacatatgcaggcaggcccgctcccaaaaccaactctttgggctgagccagggtccgtcatttcatggggcaattctgtcacaatctggtgtcagggcacactagaggcgcgcgagtaccggttagacaaggaggaatcgccagccccctgggacaggcagaatccacttgagccgaaaaataaagcgagattctcaatcccttccatgaccgaagattatgccggaagatatagatgttattatagaagccctgtaggatggtctcagccatctgatcccctggagttggtgatgacaggcgcctactccaagcccacactgtccgccctccctagccctctggtcacgagcggcaaatccgttaccctcctgtgccagagtaggtcccccatggacacatttctgttaataaaagagcgggccgcgcaccccttgcttcacctgcggagcgaacatggagcacaacagcatcaggctgaatttcccatgtcgcctgtgacctcagtgcacggtgggacttaccgctgtttctcctcccatgggttctctcattacctgttgtcccaccccagcgatcctctggaactcattgtttccggatccctggaggatcctcggcccagccctacgaggtctgtgtcaacggccgccgggcccgaagaccagcccctgatgcccactggctctgtgccccattccggcctgcggcggcactgggaggtacttatcggggtgctggtcgtaagcatcctgctcttaagcctgctcttgtttctcctgctgcagcactggagacagggcaaacacagaaccctggctcagagacaagcagatttccagagaccacccggtgccgccgagccagagcccaaggacggcggactgcaacggaggagcagcccagccgctgatgtccagggggagaatttctgtgccgccgttaagaatacccagcctgaggatggtgtggaaatggatacccgacagtcaccccacgacgaggaccctcaggctgtgacctatgcaaaggtaaagcacagccgtcccagaagagagatggcctctccacccagtccgttgagcggagaatttctggacactaaagacaggcaggccgaagaagacagacagatggataccgaagctgccgcaagcgaagctcctcaagatgtcacatatgcccagttgcactcgttcactcttagacagaaagccacagagccccctccttcacaggagggagcaagccccgcggagccttcagtctatgccacgctggctatccattag

SEQ ID NO: 345809 - DNA, 1347 bp, Artificial Sequence
  derived and/or modified sequence
atgatccccaccttcacggcccttttgtgtcttggcctctctctgggtccgaggacccacatgcaggctggcccattgcccaaacccaccctttgggctgagccaggttccgtcattagctggggaaattctgtgaccatctggtgccagggcactctggaggcaagggagtacaggcttgacaaggaggagtcaccagccccttgggataggcaaaatcccttggagcctaagaacaaggccagattttctattccatctatgacggaagattatgcaggccgataccgatgttactacaggtcgcccgtggggtggtcccaacctagtgatcctcttgagcttgtcatgacgggggcttacagtaagccgaccctttctgcccttccatcccctctagtgacgtctggtaagtccgtgaccctattgtgtcagagtcgctcccccatggacacgtttctgctgattaaggagagagctgcacatcctcttctgcatttgagaagcgagcatggtgcacagcaacaccaggccgagtttcctatgagccccgttacttcagttcacggaggtacctatcgatgcttcagttcacatgggttctcccattatctgctgtcccaccctagcgacccactcgagttaatcgtgtcaggctcactcgaagatccacggccatctcccacaagaagcgtgtccaccgctgccggtcccgaagaccagccactcatgcctaccggctctgttcctcatagcgggctcaggcggcattgggaagtgttgatcggagtcctcgtggttagcatcctcctgctgtccctactgctgtttctcttgctgcagcactggaggcagggcaaacacagaacccttgcccagcggcaggccgattttcagagaccaccaggcgcagcagagcccgagccgaaagacggcggactccagagacgatcctcacctgccgcagatgtccagggggaaaacttctgcgcggctgtgaagaacactcaacccgaggatggtgtagaaatggacaccagacaatcaccccatgacgaggatccccaggccgtcacctacgcgaaggtgaagcatagtagacccagaagagagatggccagtcccccttctcccctgtctggggagttcctggataccaaggacagacaggccgaggaggaccggcagatggacactgaggcagctgcaagtgaggctccgcaggatgtaacatatgcccagttacactctttcacactccggcagaaagcaactgagccacccccatcccaggagggcgcttccccggcagagccctcagtgtacgccacacttgctatccattag

SEQ ID NO: 345810 - DNA, 1347 bp, Artificial Sequence
  derived and/or modified sequence
atgatcccgacgtttaccgcactgctttgcttaggtctgagccttggaccacggacacacatgcaagctgggccactgcctaagccaaccctgtgggctgagccaggaagcgtcatttcctggggtaactctgttacgatctggtgtcaggggactctggaggcaagggaataccggttggacaaggaggaatcccccgctccctgggaccgtcagaaccctcttgaacccaaaaacaaggctcgattttctattccttcaatgacggaagattacgccggtcggtatcggtgctactacaggagtcctgtcggctggtcccagccctccgatcccctggaactggtcatgactggtgcgtactctaaacccactttgtccgcattaccctcccccctcgtcacgtcaggtaagagcgtaaccctgctctgccagagtaggagtccgatggatacattcctgttgataaaggagcgcgcagcacacccattactgcatctccgcagcgaacacggggctcagcagcatcaggccgagttcccaatgtctcctgtgacatccgtccacggaggtacctatagatgtttcagctcccatggtttttcccactacctcctatcacacccttctgatcctttagaactcatcgttagcggcagtttggaggaccctagaccttcaccaacaaggtccgtgagcaccgccgctggcccagaggaccagccgctgatgcccaccggttccgtgccacactccggcctccggagacactgggaggtgctgataggggtgctagtagtgtccattctgctgctttctttgctgctgttcctcctgttgcagcactggcgccagggaaagcaccgaactttggcccaaagacaggcagattttcagaggccccctggggctgcggaacccgaaccaaaggacggaggcctacagcgaaggtctagccctgccgctgacgtgcagggggagaacttctgtgcagctgtcaagaacactcagccagaggatggagtggagatggatacacggcagtccccacacgacgaagatccacaggccgtgacatatgccaaggtaaaacactctcgcccacggagagaaatggctagtcccccttcccccttgtccggcgaattcttagacacaaaagaccgacaagccgaggaagataggcaaatggatacagaggctgcagccagcgaggctccacaggatgttacatatgcccagctccactccttcactctgaggcagaaagcaactgagccacccccaagccaggagggcgctagtccagccgagcctagtgtttatgcaaccctggctatacattag

SEQ ID NO: 345811 - DNA, 1347 bp, Artificial Sequence
  derived and/or modified sequence
atgatccccaccttcaccgccctgctgtgcctgggcctgagcctgggccccagaacccacatgcaggccggccccctgcccaagcccaccctgtgggccgagcccggcagcgtgatcagctggggcaacagcgtgaccatctggtgccagggcaccctggaggccagagagtacagactggacaaggaggagagccccgccccctgggacagacagaaccccctggagcccaagaacaaggccagattcagcatccccagcatgaccgaggactacgccggcagatacagatgctactacagaagccccgtgggctggagccagcccagcgaccccctggagctggtgatgaccggcgcctacagcaagcccaccctgagcgccctgcccagccccctggtgaccagcggcaagagcgtgaccctgctgtgccagagcagaagccccatggacaccttcctgctgatcaaggagagagccgcccaccccctgctgcacctgagaagcgagcacggcgcccagcagcaccaggccgagttccccatgagccccgtgaccagcgtgcacggcggcacctacagatgcttcagcagccacggcttcagccactacctgctgagccaccccagcgaccccctggagctgatcgtgagcggcagcctggaggaccccagacccagccccaccagaagcgtgagcaccgccgccggccccgaggaccagcccctgatgcccaccggcagcgtgccccacagcggcctgagaagacactgggaggtgctgatcggcgtgctggtggtgagcatcctgctgctgagcctgctgctgttcctgctgctgcagcactggagacagggcaagcacagaaccctggcccagagacaggccgacttccagagaccccccggcgccgccgagcccgagcccaaggacggcggcctgcagagaagaagcagccccgccgccgacgtgcagggcgagaacttctgcgccgccgtgaagaacacccagcccgaggacggcgtggagatggacaccagacagagcccccacgacgaggacccccaggccgtgacctacgccaaggtgaagcacagcagacccagaagagagatggccagcccccccagccccctgagcggcgagttcctggacaccaaggacagacaggccgaggaggacagacagatggacaccgaggccgccgccagcgaggccccccaggacgtgacctacgcccagctgcacagcttcaccctgagacagaaggccaccgagcccccccccagccaggagggcgccagccccgccgagcccagcgtgtacgccaccctggccatccactag

SEQ ID NO: 345812 - DNA, 1347 bp, Artificial Sequence
  derived and/or modified sequence
atgatccccaccttcacggctctgctctgcctcgggctgagtctgggccccaggacccacatgcaggcagggcccctccccaaacccaccctctgggctgagccaggctctgtgatcagctgggggaactctgtgaccatctggtgtcaggggaccctggaggctcgggagtaccgtctggataaagaggaaagcccagcaccctgggacagacagaacccactggagcccaagaacaaggccagattctccatcccatccatgacagaggactatgcagggagataccgctgttactatcgcagccctgtaggctggtcacagcccagtgaccccctggagctggtgatgacaggagcctacagtaaacccaccctttcagccctgccgagtcctcttgtgacctcaggaaagagcgtgaccctgctgtgtcagtcacggagcccaatggacactttccttctgatcaaggagcgggcagcccatcccctactgcatctgagatcagagcacggagctcagcagcaccaggctgaattccccatgagtcctgtgacctcagtgcacggggggacctacaggtgcttcagctcacacggcttctcccactacctgctgtcacaccccagtgaccccctggagctcatagtctcaggatccttggaggatcccaggccctcacccacaaggtccgtctcaacagctgcaggccctgaggaccagcccctcatgcctacagggtcagtcccccacagtggtctgagaaggcactgggaggtactgatcggggtcttggtggtctccatcctgcttctctccctcctcctcttcctcctcctccaacactggcgtcagggaaaacacaggacattggcccagagacaggctgatttccaacgtcctccaggggctgccgagccagagcccaaggacgggggcctacagaggaggtccagcccagctgctgacgtccagggagaaaacttctgtgctgccgtgaagaacacacagcctgaggacggggtggaaatggacactcggcagagcccacacgatgaagacccccaggcagtgacgtatgccaaggtgaaacactccagacctaggagagaaatggcctctcctccctccccactgtctggggaattcctggacacaaaggacagacaggcagaagaggacagacagatggacactgaggctgctgcatctgaagccccccaggatgtgacctacgcccagctgcacagctttaccctcagacagaaggcaactgagcctcctccatcccaggaaggggcctctccagctgagcccagtgtctatgccactctggccatccactaa

SEQ ID NO: 345813 - protein, 259 aa, Artificial Sequence
  derived and/or modified sequence
MIPTFTALLCLGLSLGPRTHMQAGPLPKPTLWAEPGSVISWGNSVTIWCQGTLEAREYRLDKEESPAPWDRQNPLEPKNKARFSIPSMTEDYAGRYRCYYRSPVGWSQPSDPLELVMTGAYSKPTLSALPSPLVTSGKSVTLLCQSRSPMDTFLLIKERAAHPLLHLRSEHGAQQHQAEFPMSPVTSVHGGTYRCFSSHGFSHYLLSHPSDPLELIVSGSLEDPRPSPTRSVSTAAGPEDQPLMPTGSVPHSGLRRHWE

SEQ ID NO: 345814 - protein, 503 aa, Artificial Sequence
  derived and/or modified sequence
MIPTFTALLCLGLSLGPRTHMQAGPLPKPTLWAEPGSVISWGNSVTIWCQGTLEAREYRLDKEESPAPWDRQNPLEPKNKARFSIPSMTEDYAGRYRCYYRSPVGWSQPSDPLELVMTGAYSKPTLSALPSPLVTSGKSVTLLCQSRSPMDTFLLIKERAAHPLLHLRSEHGAQQHQAEFPMSPVTSVHGGTYRCFSSHGFSHYLLSHPSDPLELIVSGSLEDPRPSPTRSVSTAAGPEDQPLMPTGSVPHSGLRRHWEGGGGSGGGGSGGGGSAESKYGPPCPPCPAPEAAGGPSVFLFPPKPKDTLMISRTPEVTCVVVDVSQEDPEVQFNWYVDGVEVHNAKTKPREEQFNSTYRVVSVLTVLHQDWLNGKEYKCKVSNKGLPSSIEKTISKAKGQPREPQVYTLPPSQEEMTKNQVSLTCLVKGFYPSDIAVEWESNGQPENNYKTTPPVLDSDGSFFLYSRLTVDKSRWQEGNVFSCSVMHEALHNHYTQKSLSLSLG

SEQ ID NO: 345815 - protein, 447 aa, Artificial Sequence
  derived and/or modified sequence
MIPTFTALLCLGLSLGPRTHMQAGPLPKPTLWAEPGSVISWGNSVTIWCQGTLEAREYRLDKEESPAPWDRQNPLEPKNKARFSIPSMTEDYAGRYRCYYRSPVGWSQPSDPLELVMTGAYSKPTLSALPSPLVTSGKSVTLLCQSRSPMDTFLLIKERAAHPLLHLRSEHGAQQHQAEFPMSPVTSVHGGTYRCFSSHGFSHYLLSHPSDPLELIVSGSLEDPRPSPTRSVSTAAGPEDQPLMPTGSVPHSGLRRHWEVLIGVLVVSILLLSLLLFLLLQHWRQGKHRTLAQRQADFQRPPGAAEPEPKDGGLQRRSSPAADVQGENFCAAVKNTQPEDGVEMDTRSPHDEDPQAVTYAKVKHSRPRREMASPPSPLSGEFLDTKDRQAEEDRQMDTEAAASEAPQDVTYAQLHSFTLRQKATEPPPSQEGASPAEPSVYATLAIH

SEQ ID NO: 345816 - DNA, 1344 bp, Artificial Sequence
  derived and/or modified sequence
atgatccccaccttcacggctctcctgtgcctaggcctttctctgggacctaggacacacatgcaggcaggccctctgccgaagccaaccctgtgggccgaacccggctccgtgatcagctggggaaactccgtcactatctggtgccagggtacactggaagcaagagagtaccgcctggacaaggaagagtcacccgctccttgggaccgacagaaccccctggaaccaaaaaacaaagcccggttcagtatcccgagcatgacagaagattacgccggaaggtatcggtgttattacagatccccagtaggctggtcgcaaccatccgaccccctggagttagtgatgaccggcgcctattcaaagccaactttgtccgctttaccttctcctctggtaacgtcgggaaaaagcgttaccctcctgtgtcagtcacgaagtccaatggacaccttcctgttgatcaaggaacgtgcagctcatcctctgttgcacttgcgcagcgaacacggggcgcagcagcaccaggcagagtttccgatgtccccagtgacctccgttcatggggggacatacaggtgctttagttctcatggcttctctcactacttgttatctcatccgagtgacccactggaactgatcgtatcagggtcactggaggatcctcggccatctcccacacgtagcgtaagcactgccgcaggtccagaggaccaacctctaatgccgacgggtagcgtgcctcattccggactgaggcggcactgggaagtgctgatcggggttctggtggtatccattttgctcctgtccctccttctgtttctgctgcttcaacattggaggcagggaaagcaccggaccctggcccagaggcaagcggatttccagaggcctccaggggctgcagagcctgagccgaaagatggcggcttgcagcgtagaagctcgcccgccgccgacgttcagggcgagaatttttgtgccgctgtaaagaacactcagcccgaagatggagtggagatggacacgcggtcgccccacgatgaagatcctcaggccgttacttacgcgaaggtgaaacacagtaggccaaggcgcgagatggcctcaccgccaagccccttgtccggggagtttctggacacaaaagataggcaggcagaggaagatcgtcagatggacactgaagctgctgcttccgaagctccacaggacgtgacttatgcacaattgcattcatttactctgaggcagaaagctactgaaccgccaccaagtcaggaaggagcttcacctgcagaacccagtgtgtacgctacccttgccatccactag

SEQ ID NO: 345817 - DNA, 1344 bp, Artificial Sequence
  derived and/or modified sequence
atgatccccaccttcaccgccctgctgtgcctgggcctgagcctgggccccaggacccacatgcaggccggccccctgcccaagcccaccctgtgggccgagcccggcagcgtcatctcctggggcaacagcgtgaccatctggtgccagggcaccctggaggcccgggagtaccgcctggacaaggaggagagccctgccccctgggaccggcagaaccccctggagcccaagaacaaggcccgcttcagcatccccagcatgacagaggactatgccggccgctaccgctgctactaccgcagccctgtgggctggagccagcccagcgaccccctggagctggtgatgaccggggcctacagcaagcccaccctgagcgccctgcccagccccctggtgaccagcggcaagtctgtgaccctgctgtgccagagccgcagccccatggacaccttcctgctgatcaaggagcgggccgcccaccccctgctgcacctgcggagtgaacatggagcccagcagcaccaggccgagttccccatgagccctgtgacctctgtgcatggaggcacctaccgctgcttcagcagccacggcttcagccactacctgctgagccaccccagcgaccccctggagctgattgtgtctggcagcctggaggacccccggcccagccccaccaggtctgtgtccacagctgctggccctgaggaccagcccctgatgcccaccggctctgtgccccacagcggcctgcggcggcactgggaggtgctgattggagtgctggtggtgtccatcctgctgctgagcctgctgctcttcctgctgctgcagcactggaggcagggcaagcacaggaccctggcccagaggcaggccgacttccagaggcctcctggagctgctgagcctgagcccaaggatggcggcctgcagaggaggagcagccctgctgctgatgtgcagggcgagaacttctgtgccgctgtgaagaacacccagccagaagatggagtggagatggacaccaggagcccccatgatgaggacccccaggccgtgacctacgccaaggtgaagcacagccggccccggcgggagatggccagcccccccagccccctgtctggagagttcctggacaccaaggaccggcaggccgaggaggaccggcagatggacacagaggccgccgccagcgaggccccccaggatgtgacctacgcccagctgcacagcttcaccctgcggcagaaggccacagagcccccacccagccaggagggcgccagccctgctgagcccagcgtgtatgccaccctggccatccactag

SEQ ID NO: 345818 - DNA, 1761 bp, Artificial Sequence
  derived and/or modified sequence
catccatctgcacagctggggcccctgggaggagacgccatgatccccaccttcacggctctgctctgcctcgggctgagtctgggccccaggacccacatgcaggcagggcccctccccaaacccaccctctgggctgagccaggctctgtgatcagctgggggaactctgtgaccatctggtgtcaggggaccctggaggctcgggagtaccgtctggataaagaggaaagcccagcaccctgggacagacagaacccactggagcccaagaacaaggccagattctccatcccatccatgacagaggactatgcagggagataccgctgttactatcgcagccctgtaggctggtcacagcccagtgaccccctggagctggtgatgacaggagcctacagtaaacccaccctttcagccctgccgagtcctcttgtgacctcaggaaagagcgtgaccctgctgtgtcagtcacggagcccaatggacactttccttctgatcaaggagcgggcagcccatcccctactgcatctgagatcagagcacggagctcagcagcaccaggctgaattccccatgagtcctgtgacctcagtgcacggggggacctacaggtgcttcagctcacacggcttctcccactacctgctgtcacaccccagtgaccccctggagctcatagtctcaggatccttggaggatcccaggccctcacccacaaggtccgtctcaacagctgcaggccctgaggaccagcccctcatgcctacagggtcagtcccccacagtggtctgagaaggcactgggaggtactgatcggggtcttggtggtctccatcctgcttctctccctcctcctcttcctcctcctccaacactggcgtcagggaaaacacaggacattggcccagagacaggctgatttccaacgtcctccaggggctgccgagccagagcccaaggacgggggcctacagaggaggtccagcccagctgctgacgtccagggagaaaacttctgtgctgccgtgaagaacacacagcctgaggacggggtggaaatggacactcggagcccacacgatgaagacccccaggcagtgacgtatgccaaggtgaaacactccagacctaggagagaaatggcctctcctccctccccactgtctggggaattcctggacacaaaggacagacaggcagaagaggacagacagatggacactgaggctgctgcatctgaagccccccaggatgtgacctacgcccagctgcacagctttaccctcagacagaaggcaactgagcctcctccatcccaggaaggggcctctccagctgagcccagtgtctatgccactctggccatccactaatccaggggggacccagaccccacaagccatggagactcaggaccccagaaggcatggaagctgcctccagtagacatcactgaaccccagccagcccagacccctgacacagaccactagaagattccgggaacgttgggagtcacctgattctgcaaagataaataatatccctgcattatcaaaataaagtagcagacctctcaattcacaatgagttaactgataaaacaaaacagaagtcagacaatgttttaaattgaatgatcatgtaaatattacacatcaaaccaatgacatgggaaaatgggagcttctaatgaggacaaacaaaaaatagagaaaaattaataaagtcaaaatgtttattcttgaaaa

SEQ ID NO: 345819 - DNA, 1344 bp, Artificial Sequence
  derived and/or modified sequence
atgatccccaccttcaccgccctgctgtgcctgggcctgagcctgggtccccggactcacatgcaggcgggcccgctcccaaagcccacactttgggccgagcccggtagcgtcatcagttggggaaactcggtgacgatctggtgtcaggggaccctggaggccagagagtatcgattggacaaggaggaatcaccggcaccctgggaccgccagaacccactggagcctaagaacaaggcacggttctcaatccccagcatgaccgaggactacgccggacgctatcgttgctactaccgaagccccgtgggctggtcccaaccatcagacccactggagctcgtgatgacaggagcctacagcaaacctacactttccgcattgccctctcccctggtgacaagcggaaaaagcgtgacgctgctttgtcagagcaggagccctatggacaccttcctgctcatcaaagagagggcagcgcaccccctgctccaccttcgttccgagcacggggcccagcagcaccaggctgagtttccgatgagccccgtgacaagcgtgcatggcggaacataccggtgttttagcagccacgggttctctcattatttactcagtcacccctcggatcccctggaactcatcgtctccgggagcctggaagatccccggcctagtccaaccagaagcgtctccaccgcggccgggcctgaggatcaaccattgatgcctactggcagcgtccctcactcaggtcttagaaggcactgggaggtccttatcggagttctggtggtgtcaatcctcctgctgagccttctcctcttcttgctcctgcagcactggaggcagggaaaacaccgtacactagctcagagacaggctgactttcagcgacctccaggcgccgccgagcctgaacctaaggatggaggcctgcaacggagatcttcacccgcagccgatgtccagggggagaacttctgtgccgccgttaagaatacccagcctgaagacggcgtggaaatggatacccgcagtccgcacgacgaggacccgcaggcagtgacttatgccaaagttaagcattcacgacccagacgcgaaatggcttctcccccatcaccgctctctggcgagttcctggataccaaagacagacaggccgaggaagacagacagatggacactgaggctgcagcctccgaagccccccaggatgtcacctacgcccagctgcatagttttacattgcgccagaaggctaccgaacccccaccttcacaggagggggcctctcctgccgaaccgtccgtgtatgctactctggcaatccattag

SEQ ID NO: 345820 - DNA, 1344 bp, Artificial Sequence
  derived and/or modified sequence
atgattccaacattcacagctctgttgtgcctgggtctgtctctcggccctcggacccacatgcaggccggtccactcccaaaacccaccctgtgggccgaacccggatccgtgatttcttgggggaacagcgtcaccatctggtgccaggggaccctcgaagcacgcgagtatagactcgataaggaagagagccccgcaccatgggaccggcagaacccgctggagccaaaaaataaagccagattctctataccttccatgactgaggactacgccggaaggtacaggtgctattaccgttctccagtgggctggagccagcccagcgacccattagagctcgtgatgacgggtgcgtacagtaagccgaccctatcagcattaccgagccccctggtgaccagtgggaagagtgtgactctcctctgtcaaagcagaagccctatggacacgtttctgcttatcaaagaaagagcagcccaccccctcctgcatctgcgtagcgagcacggagcacaacagcaccaggccgaatttcccatgtctcctgtgacaagcgtgcatggaggaacgtatcggtgcttctccagccacggcttcagtcattacttactgtcccatccctcagaccccctcgagttaattgtttccggatccctagaggacccaagaccatcccccacacgatctgtctctacggccgctggccctgaggatcagcctctgatgccgaccgggtccgtgccccactccggcctccgaagacactgggaagtgctcattggggtccttgtggtgtccatactgctcctgagtctgctcttgtttctcctgctacaacactggcggcaagggaaacaccgaactctagctcagcgacaagcagacttccaacgccctccaggagcagccgagccagaacccaaggacggaggcctccagagacggtcatcccccgcagctgacgtgcagggcgaaaacttctgcgccgctgtgaagaatacacagccagaagacggcgtggaaatggacacacgctccccacacgatgaagaccctcaggctgttacatatgccaaggtaaagcacagccgcccacgccgagaaatggcctccccaccctccccgctgagcggagaatttctggacactaaagataggcaagcagaagaggatagacagatggacactgaggcagccgcatcagaagcgccacaagacgtgacctacgctcagctgcatagttttacccttaggcagaaagctacagaaccgcctccgtctcaagaaggtgcctctccagctgagccctctgtgtatgccaccctggcaatccattag

SEQ ID NO: 345821 - DNA, 1344 bp, Artificial Sequence
  derived and/or modified sequence
atgatccccaccttcaccgccctgctgtgcctgggcctgagcctgggccccagaacccacatgcaggccggccccctgcccaagcccaccctgtgggccgagcccggcagcgtgatcagctggggcaacagcgtgaccatctggtgccagggcaccctggaggccagagagtacagactggacaaggaggagagccccgccccctgggacagacagaaccccctggagcccaagaacaaggccagattcagcatccccagcatgaccgaggactacgccggcagatacagatgctactacagaagccccgtgggctggagccagcccagcgaccccctggagctggtgatgaccggcgcctacagcaagcccaccctgagcgccctgcccagccccctggtgaccagcggcaagagcgtgaccctgctgtgccagagcagaagccccatggacaccttcctgctgatcaaggagagagccgcccaccccctgctgcacctgagaagcgagcacggcgcccagcagcaccaggccgagttccccatgagccccgtgaccagcgtgcacggcggcacctacagatgcttcagcagccacggcttcagccactacctgctgagccaccccagcgaccccctggagctgatcgtgagcggcagcctggaggaccccagacccagccccaccagaagcgtgagcaccgccgccggccccgaggaccagcccctgatgcccaccggcagcgtgccccacagcggcctgagaagacactgggaggtgctgatcggcgtgctggtggtgagcatcctgctgctgagcctgctgctgttcctgctgctgcagcactggagacagggcaagcacagaaccctggcccagagacaggccgacttccagagaccccccggcgccgccgagcccgagcccaaggacggcggcctgcagagaagaagcagccccgccgccgacgtgcagggcgagaacttctgcgccgccgtgaagaacacccagcccgaggacggcgtggagatggacaccagaagcccccacgacgaggacccccaggccgtgacctacgccaaggtgaagcacagcagacccagaagagagatggccagcccccccagccccctgagcggcgagttcctggacaccaaggacagacaggccgaggaggacagacagatggacaccgaggccgccgccagcgaggccccccaggacgtgacctacgcccagctgcacagcttcaccctgagacagaaggccaccgagcccccccccagccaggagggcgccagccccgccgagcccagcgtgtacgccaccctggccatccactag

SEQ ID NO: 345822 - protein, 193 aa, Artificial Sequence
  derived and/or modified sequence
MTPALTALLCLGLSLGPRTRVQAGPFPKPTLWAEPGSVISWGSPVTIWCQGSLEAQEYQLDKEGSPEPLDRNNPLEPKNKARFSIPSMTQHHAGRYRCHYYSSAGWSEPSDPLELVMTGFYNKPTLSALPSPVVASGGNMTLRCGSQKGYHHFVLMKEGEHQLPRTLDSQQLHSGGFQALFPVGPVTPSHRRV

SEQ ID NO: 345823 - protein, 455 aa, Artificial Sequence
  derived and/or modified sequence
MTPALTALLCLGLSLGPRTRVQAGPFPKPTLWAEPGSVISWGSPVTIWCQGSLEAQEYQLDKEGSPEPLDRNNPLEPKNKARFSIPSMTQHHAGRYRCHYYSSAGWSEPSDPLELVMTGFYNKPTLSALPSPVVASGGNMTLRCGSQKGYHHFVLMKEGEHQLPRTLDSQQLHSGGFQALFPVGPVTPSHRWRFTCYYYYTNTPRVWSHPSDPLEILPSGVSRKPSLLTLQGPVLAPGQSLTLQCGSDVGYDRFVLYKEGERDFLQRPGQQPQAGLSQANFTLGPVSPSHGGQYRCYGAHNLSSEWSAPSDPLNILMAGQIYDTVSLSAQPGPTVASGENVTLLCQSRGYFDTFLLTKEGAAHPPLRLRSMYGAHKYQAEFPMSPVTSAHAGTYRCYGSYSSNPHLLSFPSEPLELMVSGEGADPVLSELKGSAQAQAPRRALGWDGPREAVREA

SEQ ID NO: 345824 - protein, 158 aa, Artificial Sequence
  derived and/or modified sequence
MTPALTALLCLGLSLGPRTRVQAGPFPKPTLWAEPGSVISWGSPVTIWCQGSQEAQEYRLHKEGSPEPLDRNNPLEPKNKARFSIPSMTEHHAGRYRCHYYSSAGWSEPSDPLEMVMTGAYSKPTLSALPSPVVASGGNMTLRCGSQKGYHHFVLMKE

SEQ ID NO: 345825 - DNA, 477 bp, Artificial Sequence
  derived and/or modified sequence
atgacacctgctctgacagccttgctgtgtttggggctgtctcttggccctcggacgcgagttcaggcaggacctttccctaaacctactctctgggccgaacctggctcagtcatctcctggggttccccagtcaccatttggtgccagggatcgcaggaggcccaggagtaccggctgcacaaagaggggtccccggagccgttagatagaaacaacccattagaacccaagaataaggcccgattctcgatcccttcaatgaccgagcaccatgctggcaggtacagatgccactactacagctctgctgggtggtctgaaccaagcgatccacttgaaatggtaatgactggcgcttatagtaagccaacgttgtccgcactgccgtcccccgtcgttgcgtcgggtggaaacatgacccttaggtgtgggagtcagaaaggctaccatcatttcgtccttatgaaagaatag

SEQ ID NO: 345826 - DNA, 477 bp, Artificial Sequence
  derived and/or modified sequence
atgaccccagccctgacagccctgctgtgcctgggcctgagcctgggccccaggaccagggtgcaggccggccccttccccaagcccaccctgtgggccgagcccggcagcgtcatctcctggggcagccctgtgaccatctggtgccagggcagccaggaggcccaggagtaccgcctgcacaaggagggcagccctgagcccctggacaggaacaaccccctggagcccaagaacaaggcccgcttcagcatccccagcatgacagagcaccacgccggccgctaccgctgccactactacagcagcgctggctggagcgagcccagcgaccccctggagatggtgatgaccggggcctacagcaagcccaccctgagcgccctgcccagccctgtggtggccagcggcggcaacatgaccctgcgctgtggcagccagaagggctaccaccactttgtgctgatgaaggagtag

SEQ ID NO: 345827 - DNA, 586 bp, Artificial Sequence
  derived and/or modified sequence
atgacaagaaggacccagcctccgagcggccacaccctgtgtgtctctctgtcctgccagcactgagggctcatccctctgcagagcgcggggtcaccgggaggagacgccatgacgcccgccctcacagccctgctctgccttgggctgagtctgggccccaggacccgcgtgcaggcagggcccttccccaaacccaccctctgggctgagccaggctctgtgatcagctgggggagccccgtgaccatctggtgtcaggggagccaggaggcccaggagtaccgactgcataaagagggaagcccagagcccttggacagaaataacccactggaacccaagaacaaggccagattctccatcccatccatgacagagcaccatgcagggagataccgctgccactattacagctctgcaggctggtcagagcccagcgaccccctggagatggtgatgacaggagcctacagcaaacccaccctctcagccctgcccagccctgtggtggcctcaggggggaatatgaccctccgatgtggctcacagaagggatatcaccattttgttctgatgaaggaag

SEQ ID NO: 345828 - DNA, 477 bp, Artificial Sequence
  derived and/or modified sequence
atgacccccgccctgaccgccctgctgtgcctgggcctgagcctgggccctaggacgcgggtacaagccgggcccttccccaagcccactctatgggcggagccaggtagtgttatctcctggggaagccccgtcacaatctggtgccagggaagtcaggaggcccaggaatatcgacttcacaaggagggctcccctgaacccttggatcggaataaccccctggagcctaaaaataaagcccggtttagcattccttcgatgaccgaacatcacgctgggaggtatcgatgtcattactatagcagtgcgggatggtcggaaccttctgacccccttgaaatggttatgactggcgcgtactccaagcctactttgagtgccctgccctccccagtggtagcgtccggcggcaatatgactctgagatgtggaagccagaaggggtaccaccatttcgttttgatgaaggagtag

SEQ ID NO: 345829 - DNA, 477 bp, Artificial Sequence
  derived and/or modified sequence
atgacccccgcattgaccgcccttctgtgtctggggttatccctgggacctaggacccgagtgcaagccggaccttttcctaaaccaacgctgtgggccgaacctggttccgtgatctcgtggggctcaccggtgaccatctggtgccaggggagccaggaagctcaggagtataggctgcacaaggagggctctcccgaaccccttgaccgcaacaacccattggaacctaaaaataaggcaaggttttctattccgtccatgactgagcatcacgcgggacgatacagatgccactactacagttctgctggctggagcgagcccagtgaccctttggagatggtcatgacgggcgcttatagcaaacctactttatctgcccttccctcacccgtcgttgcctccggcggtaatatgaccctgaggtgtggaagccaaaagggctatcatcactttgtgcttatgaaagagtag

SEQ ID NO: 345830 - DNA, 477 bp, Artificial Sequence
  derived and/or modified sequence
atgacccccgccctgaccgccctgctgtgcctgggcctgagcctgggccccagaaccagagtgcaggccggccccttccccaagcccaccctgtgggccgagcccggcagcgtgatcagctggggcagccccgtgaccatctggtgccagggcagccaggaggcccaggagtacagactgcacaaggagggcagccccgagcccctggacagaaacaaccccctggagcccaagaacaaggccagattcagcatccccagcatgaccgagcaccacgccggcagatacagatgccactactacagcagcgccggctggagcgagcccagcgaccccctggagatggtgatgaccggcgcctacagcaagcccaccctgagcgccctgcccagccccgtggtggccagcggcggcaacatgaccctgagatgcggcagccagaagggctaccaccacttcgtgctgatgaaggagtag

SEQ ID NO: 345831 - DNA, 582 bp, Artificial Sequence
  derived and/or modified sequence
atgacccccgccctgaccgccctgctgtgcctgggcctgagcctgggccccagaaccagagtgcaggccggccccttccccaagcccaccctgtgggccgagcccggcagcgtgatcagctggggcagccccgtgaccatctggtgccagggcagcctggaggcccaggagtaccagctggacaaggagggcagccccgagcccctggacagaaacaaccccctggagcccaagaacaaggccagattcagcatccccagcatgacccagcaccacgccggcagatacagatgccactactacagcagcgccggctggagcgagcccagcgaccccctggagctggtgatgaccggcttctacaacaagcccaccctgagcgccctgcccagccccgtggtggccagcggcggcaacatgaccctgagatgcggcagccagaagggctaccaccacttcgtgctgatgaaggagggcgagcaccagctgcccagaaccctggacagccagcagctgcacagcggcggcttccaggccctgttccccgtgggccccgtgacccccagccacagaagagtgtag

SEQ ID NO: 345832 - DNA, 1368 bp, Artificial Sequence
  derived and/or modified sequence
atgacccccgccctgaccgccctgctgtgcctgggcctgagcctgggccccagaaccagagtgcaggccggccccttccccaagcccaccctgtgggccgagcccggcagcgtgatcagctggggcagccccgtgaccatctggtgccagggcagcctggaggcccaggagtaccagctggacaaggagggcagccccgagcccctggacagaaacaaccccctggagcccaagaacaaggccagattcagcatccccagcatgacccagcaccacgccggcagatacagatgccactactacagcagcgccggctggagcgagcccagcgaccccctggagctggtgatgaccggcttctacaacaagcccaccctgagcgccctgcccagccccgtggtggccagcggcggcaacatgaccctgagatgcggcagccagaagggctaccaccacttcgtgctgatgaaggagggcgagcaccagctgcccagaaccctggacagccagcagctgcacagcggcggcttccaggccctgttccccgtgggccccgtgacccccagccacagatggagattcacctgctactactactacaccaacacccccagagtgtggagccaccccagcgaccccctggagatcctgcccagcggcgtgagcagaaagcccagcctgctgaccctgcagggccccgtgctggcccccggccagagcctgaccctgcagtgcggcagcgacgtgggctacgacagattcgtgctgtacaaggagggcgagagagacttcctgcagagacccggccagcagccccaggccggcctgagccaggccaacttcaccctgggccccgtgagccccagccacggcggccagtacagatgctacggcgcccacaacctgagcagcgagtggagcgcccccagcgaccccctgaacatcctgatggccggccagatctacgacaccgtgagcctgagcgcccagcccggccccaccgtggccagcggcgagaacgtgaccctgctgtgccagagcagaggctacttcgacaccttcctgctgaccaaggagggcgccgcccacccccccctgagactgagaagcatgtacggcgcccacaagtaccaggccgagttccccatgagccccgtgaccagcgcccacgccggcacctacagatgctacggcagctacagcagcaacccccacctgctgagcttccccagcgagcccctggagctgatggtgagcggcgagggcgccgaccccgtgctgagcgagctgaagggcagcgcccaggcccaggcccccagaagagccctgggctgggacggccccagagaggccgtgagagaggcctag

SEQ ID NO: 345833 - DNA, 582 bp, Artificial Sequence
  derived and/or modified sequence
atgacaccagccctgacggctctgctgtgcctgggtttaagcctggggcctcggacgcgtgtacaggctggccctttcccaaaacccacgctctgggccgaaccggggtccgtgatctcttggggttctcccgtcaccatttggtgtcaagggagtctcgaagctcaggagtatcagctggacaaggagggctctccggaacctcttgatcgaaataatccgctggagcccaaaaacaaggccaggttctctatcccatctatgacccagcatcatgcgggacgttacaggtgtcattactatagctccgccgggtggtccgagccctcagaccctttagaactggtaatgactggattctacaacaagccaacactttccgccctgccttccccagtagtcgcatccggtggtaatatgaccctacggtgtggatctcagaaaggataccatcactttgtcttgatgaaagagggcgaacaccaactgccccggactctggattcccagcagctccacagcggcggattccaggccctgtttccagtgggccccgttactccttcacacaggcgggtgtag

SEQ ID NO: 345834 - DNA, 1368 bp, Artificial Sequence
  derived and/or modified sequence
atgacacctgcactgactgctctcctctgtcttggactgtctctcggaccgcggactcgtgtgcaggcaggtccctttcccaagccgaccctgtgggctgagcctggcagcgtcatctcctggggctctcccgtgacaatttggtgccagggctctcttgaggcccaagaataccaactcgacaaggaaggctcccctgagccccttgaccggaataatcctctagagcccaagaataaggctcgattttcgattcctagtatgactcagcatcacgccggccggtataggtgccactactacagcagcgcgggctggtctgaaccttcagatccactggaactggtaatgacagggttttacaataagccaaccctttccgccttgcccagccctgtagtcgcttcgggcggcaacatgacacttcggtgtggatcccagaagggataccaccacttcgtgctgatgaaggagggagaacaccagcttccgagaacactcgactctcagcagcttcattcaggggggttccaggctctgttccccgttgggcccgtcacaccttctcacagatggcgctttacatgctactattactacacaaacacccctcgcgtctggagtcacccttctgacccccttgaaatcctgccctccggagtgagccggaagcctagcctgctcacgttgcagggcccggttctcgccccaggtcaatccctcactctgcagtgtggctcggacgtggggtacgacaggtttgtgctatacaaggaaggtgagagagactttctgcaacggcctggtcagcagccacaggcaggcctctcccaggcaaattttacgctgggccccgtgtctccatctcacggaggccagtaccgatgctatggcgcacataatttatcttctgagtggtcagcccccagtgatcccttgaacatactcatggccggccagatctacgacactgtgagcctctctgcccaacccggcccaaccgtggctagtggggagaatgtaactctcttatgccagagtcgcggctattttgacaccttcctactgacaaaggagggtgcggctcaccctcctctgcgtcttaggtcaatgtacggcgcgcacaaataccaggcggaatttccaatgtctccggtgacctcagcgcacgcagggacttatcggtgctatggcagctactcgtcaaaccctcatcttctgagctttcccagtgaaccactggagcttatggtgagcggtgaaggtgcagatccagtcctatccgagcttaaaggcagcgctcaggcccaggcccccaggcgggccctgggctgggacgggcccagggaagccgttagagaggcctag

SEQ ID NO: 345835 - DNA, 582 bp, Artificial Sequence
  derived and/or modified sequence
atgaccccagccctgacagccctgctgtgcctgggcctgagcctgggccccaggaccagggtgcaggccggccccttccccaagcccaccctgtgggccgagcccggcagcgtcatctcctggggcagccctgtgaccatctggtgccagggcagcctggaggcccaggagtaccagctggacaaggagggcagccctgagcccctggacaggaacaaccccctggagcccaagaacaaggcccgcttcagcatccccagcatgacccagcaccacgccggccgctaccgctgccactactacagcagcgctggctggagcgagcccagcgaccccctggagctggtgatgacaggcttctacaacaagcccaccctgagcgccctgcccagccctgtggtggccagcggcggcaacatgaccctgcgctgtggcagccagaagggctaccaccactttgtgctgatgaaggagggggagcaccagctgcccaggaccctggacagccagcagctgcacagcggcggcttccaggccctcttccctgtgggccctgtgacccccagccacagaagagtgtag

SEQ ID NO: 345836 - DNA, 1368 bp, Artificial Sequence
  derived and/or modified sequence
atgaccccagccctgacagccctgctgtgcctgggcctgagcctgggccccaggaccagggtgcaggccggccccttccccaagcccaccctgtgggccgagcccggcagcgtcatctcctggggcagccctgtgaccatctggtgccagggcagcctggaggcccaggagtaccagctggacaaggagggcagccctgagcccctggacaggaacaaccccctggagcccaagaacaaggcccgcttcagcatccccagcatgacccagcaccacgccggccgctaccgctgccactactacagcagcgctggctggagcgagcccagcgaccccctggagctggtgatgacaggcttctacaacaagcccaccctgagcgccctgcccagccctgtggtggccagcggcggcaacatgaccctgcgctgtggcagccagaagggctaccaccactttgtgctgatgaaggagggggagcaccagctgcccaggaccctggacagccagcagctgcacagcggcggcttccaggccctcttccctgtgggccctgtgacccccagccaccgctggaggttcacctgctactactactacaccaacaccccccgggtgtggagccaccccagcgaccccctggagatcctgcccagcggcgtgtccaggaagcccagcctgctgaccctgcagggccctgtgctggcccctggccagagcctgaccctgcagtgtggcagtgatgtgggctatgacagatttgtgctgtacaaggagggggagcgggacttcctgcagaggcctggccagcagccccaggccggcctgagccaggccaacttcaccctgggccctgtgagccccagccacggcggccagtaccgctgctatggagcccacaacctgagcagcgagtggagcgcccccagcgaccccctgaacatcctgatggccggccagatctatgacacagtgtccctgagcgcccagcccggccccaccgtggccagcggagaaaatgtgaccctgctgtgccagagccggggctactttgacaccttcctgctgaccaaggagggcgccgcccacccccccctgcggctgcgctccatgtacggggcccacaagtaccaggccgagttccccatgagccctgtgaccagcgcccatgctggcacctaccgctgctacggcagctacagcagcaacccccacctgctgtccttccccagcgagcccctggagctgatggtgtctggagagggcgctgaccctgtgctgtctgagctgaagggcagcgcccaggcccaggccccccggcgggccctgggctgggatggcccccgggaggccgtgcgggaggcctag

SEQ ID NO: 345837 - DNA, 1977 bp, Artificial Sequence
  derived and/or modified sequence
gcagagcgcggggtcaccggaaggagacgccatgacgcccgccctcacagccctgctctgccttgggctgagtctgggccccaggacccgcgtgcaggcagggcccttccccaaacccaccctctgggctgagccaggctctgtgatcagctgggggagccccgtgaccatctggtgtcaggggagcctggaggcccaggagtaccaactggataaagagggaagcccagagcccttggacagaaataacccactggaacccaagaacaaggccagattctccatcccatccatgacacagcaccatgcagggagataccgctgccactattacagctctgcaggctggtcagagcccagcgaccccctggagctggtgatgacaggattctacaacaaacccaccctctcagccctgcccagccctgtggtggcctcaggggggaatatgaccctccgatgtggctcacagaagggatatcaccattttgttctgatgaaggaaggagaacaccagctcccccggaccctggactcacagcagctccacagtggggggttccaggccctgttccctgtgggccccgtgacccccagccacaggtggaggttcacatgctattactattatacaaacaccccccgggtgtggtcccaccccagtgaccccctggagattctgccctcaggcgtgtctaggaagccctccctcctgaccctgcagggccctgtcctggcccctgggcagagcctgaccctccagtgtggctctgatgtcggctacgacagatttgttctgtataaggagggggaacgtgacttcctccagcgccctggccagcagccccaggctgggctctcccaggccaacttcaccctgggccctgtgagcccctcccacgggggccagtacaggtgctatggtgcacacaacctctcctccgagtggtcggcccccagcgaccccctgaacatcctgatggcaggacagatctatgacaccgtctccctgtcagcacagccgggccccacagtggcctcaggagagaacgtgaccctgctgtgtcagtcacggggttattttgacactttccttctgaccaaagaaggggcagcccatcccccactgcgtctgagatcaatgtacggagctcataagtaccaggctgaattccccatgagtcctgtgacctcagcccacgcggggacctacaggtgctacggctcatacagctccaacccccacctgctgtctttccccagtgagcccctggaactcatggtctcaggtgagggcgctgaccccgtcctctctgagctcaaaggctcagctcaggcccaggcccccaggagagctctcggctgggatggaccgagggaggctgtgagggaggcttagccagagggcacccagccctcagaggggaggaggccaacaggggttctcctaggcgtggccacccgttctcccctgcctggcatgcagaaggcaccaggtgggcagagagatggttccagggaatccactgggcggaagcaggagagtgggagtggaagggtgcactccatggacggcccccgcccctcacccgcctcccgtgctccttccaggacactctggaggctccagcctcccacccacagggccgccctccacacctggtgagtcactgaggcctcgtggggagcgcggcctcccccagggcagtctgagtctcccaaaggatcccactcccctcccctcaaggacgggcttgtgtcccaggggctctgaggctgggctggtgaagagtggggggttcaaggcagagagagatgttggggcccagccaggaggaggagccgggctgatgtggggagcaaggtagccccaggcttcacctccctgtcctgacccaggaggtcctgaggaccagccccttaaccccccagggtcaggccctcagaatcgtgagtgaggggctctgagtgggagat

SEQ ID NO: 345838 - DNA, 582 bp, Artificial Sequence
  derived and/or modified sequence
atgacccccgccctgaccgccctgctgtgcctgggcctgagcctgggaccacggacccgcgttcaggccggccccttcccaaagccaactctctgggctgagcccggaagtgtgatttcctggggcagtcccgtaaccatctggtgccaggggagcttggaggcacaggaataccagctggataaagaaggctctcccgagcctctggatcgcaataatcccctcgaacccaaaaataaggcgcggttttccattccttccatgacccagcatcatgcgggcaggtaccggtgtcattattacagtagtgcgggatggagcgaaccaagtgaccccctggagttggtgatgacaggattttataacaagcctactctgtctgcgctacctagtcccgtggtcgcctcagggggtaacatgacgttgcggtgtggatcccagaaaggttaccatcacttcgtgctgatgaaagaaggcgaacaccagctgcccagaactctggactcccagcaactgcactcaggtggatttcaggctctctttccagtgggccccgtgactcccagtcataggcgggtctag

SEQ ID NO: 345839 - DNA, 1368 bp, Artificial Sequence
  derived and/or modified sequence
atgacccccgccctgaccgccctgctgtgcctgggcctgagcctgggccccaggacccgggtgcaggcaggtccctttccaaagcccactctctgggccgaaccagggtccgtgatttcatggggatcgccagtgaccatctggtgccagggctccctggaagcacaggagtatcagcttgataaagaagggagcccggagcctctggaccgcaacaaccctctggagcccaagaataaggcaaggttcagcattccctccatgacacaacaccacgccggccgttaccgatgtcattactattctagtgctggatggtctgaacccagcgatcctctagaattggtgatgacaggcttctacaacaaacctacgctcagtgcactgccaagtccggttgtggcttccgggggcaatatgacactgcgctgcggctctcaaaaagggtaccaccacttcgtcttaatgaaagaaggagaacatcaactgcctagaacactggactctcagcagctgcatagtggcggatttcaagctctcttccccgtggggcccgttacacccagccacaggtggcgatttacttgctactattactacacgaacacaccgcgcgtgtggtcccatccatccgatccactagaaatactgccaagtggtgtctcccgcaagccctctctgctgactctgcagggccccgtgcttgcccctgggcagtccctgactctccaatgtggttcagatgtcggttacgatcgtttcgtgctatacaaagaaggtgagagagatttcctgcagagaccaggtcagcagccgcaggccggcctcagccaggccaatttcacacttggacctgtttctccaagtcatgggggccagtataggtgttatggggcacataatttgtcttctgaatggtctgcaccctccgaccccctgaatatcctgatggcaggacagatttacgataccgtttcactctccgctcaacccggacccacggtcgcctctggagaaaacgttactctgttgtgccagtcacgcgggtactttgatacgtttctgctgaccaaggagggagccgcacatccacctttgcgcttgagatctatgtatggcgcgcataagtatcaggccgagttccccatgtccccagtcacaagcgcccacgccggtacctataggtgctacggtagctacagctctaaccctcatttacttagcttcccatccgagcctctcgaactcatggtatccggcgagggcgcagatcccgttttgtctgagttaaagggctctgcacaagctcaagctccgcgccgggcgttggggtgggatggcccacgcgaagccgttcgagaggcttag

SEQ ID NO: 345840 - DNA, 582 bp, Artificial Sequence
  derived and/or modified sequence
atgactcctgcgctgactgccctgctttgtctgggcctatcactgggcccaagaacccgagtgcaagccggaccttttccaaaacctacactgtgggctgagcccggatctgttataagttggggaagcccagtgaccatctggtgtcagggatcacttgaagcccaggagtatcagctggacaaagagggctcccctgagcctctggatagaaataaccctttagagcccaagaataaagctcgattttctattccatcgatgacgcagcatcacgctggtcgttacaggtgtcactactatagtagcgctggttggagcgagccaagtgatccacttgagttggtcatgaccggattctacaataaacctacgctttcagcattgccaagccccgttgttgcgtccggagggaacatgacactgcgctgcgggtcacagaagggctatcaccatttcgtgctaatgaaagagggggagcaccagttgccgcgaaccctagactcccagcaactgcatagcggaggatttcaggcgctgttcccggtcggcccagttacgcctagccacaggcgggtttag

SEQ ID NO: 345841 - DNA, 1368 bp, Artificial Sequence
  derived and/or modified sequence
atgacacccgcacttacagcactcttgtgtctgggcctgtcactggggcctagaactagagtccaggcaggacccttccctaaacccacgctgtgggccgaacctggatcagtaatcagctgggggtcccccgtcaccatatggtgccagggcagccttgaagcccaggagtatcagctcgacaaagaagggagcccggaacccctcgaccggaataatccgttggaaccaaagaacaaagccagattcagcatcccgtcaatgacccaacatcacgccggtcgctacagatgccattactattcaagtgccggatggagcgaaccctctgacccgctggagctcgttatgacaggcttctacaacaagcccaccctctccgccttgcctagccctgtggtagccagcggtggcaatatgaccctgaggtgcggatcccagaaggggtaccatcacttcgtcctgatgaaggagggagagcatcagctgccaagaacactggactctcaacaactacactcgggcggatttcaggccctattccccgtgggcccagtgacaccatcccaccgctggcgcttcacttgctactattactacactaacacgcccagggtttggagccaccccagtgatccacttgagattctgccttccggcgtgagcaggaagccgtcactcctcaccctacagggtcccgtcctcgctcccggacagagtctgacacttcagtgcggttcggatgtaggctatgatcgctttgtgctgtacaaggaaggcgaacgcgatttcctccagaggcctggccagcagccacaggctggactcagtcaggcaaattttacccttggacccgtctcgccaagccatggagggcagtaccgctgttacggggcacacaacctgagtagcgaatggtccgcgccttccgatcccctgaacattttgatggctggacagatctacgacaccgtctccctgagcgcccaacccggacccaccgtggccagtggagagaatgtgacactactgtgccagtcccgtggctattttgatacgtttttgctcactaaggaaggcgcagcgcatcccccactgcgactgcgttccatgtacggtgcccataagtaccaggccgagttcccaatgtcacctgtgacctcagctcacgcaggcacgtacaggtgttatgggagctacagctcaaacccacacctgctgagtttccccagtgagccgctggagctcatggtgtcgggtgagggtgctgatcctgtgctcagcgaacttaagggctccgctcaggcgcaggctccaagacgggctctgggctgggatggcccacgggaggcggtccgtgaggcttag

SEQ ID NO: 345842 - protein, 1029 aa, Artificial Sequence
  derived and/or modified sequence
MTRENVAHNALRQEGLVKGKDDTWKWGTSFQGSSSSVWETSHLHFRQLRYHETSGPQEALSRLRELCRRWLRPEARTKAQILELLVLEQFLSILPGEIRTWVQLHHPGSGEEAVALVEELQKDLDGPAIQVPVLVKDQDTLQKVVSAPGTTLPPVLPGSHIAAEICPHPPTDLVAFNLQDPQHDSPAPEASALSQEENPRNQLMALMLLTAQPQELVMFEEVSVCFTSEEWACLGPIQRALYWDVMLENYGNVTSLEWETMTENEEVTSKPSSSQRADSHKGTSKRLQGSVPQVLDFEEECEWQVLASQWGNETDERADTVKKVSLCERDKKKRTPPEKQGQKWKELGDSLTFGSAISESLIGTEGKKFYKCDMCCKHFNKISHLINHRRIHTGEKPHKCKECGKGFIQRSSLLMHLRNHSGEKPYKCNECGKAFSQSAYLLNHQRIHTGEKPYKCKECGKGFYRHSGLIIHLRRHSGERPYKCNECGKVFSQNAYLIDHQRLHKGEEPYKCNKCQKAFILKKSLILHQRIHSGEKPYKCDECGKTFAQTTYLIDHQRLHSAENPYKCKECGKVFIRSKSLLLHQRVHTEKKTFGCKKCGKIFSSKSNFIDHKRMHSREKPYKCTECGKAFTQSAYLFDHQRLHNGEKPYECNECGKVFILKKSLILHQRFHTGENLYECKDCGKVFGSNRNLIDHERLHNGEKPYECRECGKTFIMSKSFMVHQKLHTQEKAYKCEDCGKAFSYNSSLLVHRRIHTGEKPFECSECGRAFSSNRNLIEHKRIHSGEKPYECDECGKCFILKKSLIGHQRIHTREKSYKCNDCGKVFSYRSNLIAHQRIHTGEKPYACSECGKGFTYNRNLIEHQRIHSGEKTYECHVCRKVLTSSRNLMVHQRIHTGEKPYKCNECGKDFSQNKNLVVHQRMHTGEKPYECDKCRKSFTSKRNLVGHQRIHTGEKPYGCNDCSKVFRQRKNLTVHQKIHTDEKPCECDVSEKEFSQTSNLHLQQKIHTIEEFSWLQNTNESKIEIQKI

SEQ ID NO: 345843 - protein, 79 aa, Artificial Sequence
  derived and/or modified sequence
MTRENVAHNALRQEGLVKGKDDTWKWGTSFQGSSSSVWETSHLHFRQLRYHETSGPQEALSRLRELCRRWLRPEARTKA

SEQ ID NO: 345844 - protein, 321 aa, Artificial Sequence
  derived and/or modified sequence
MTRENVAHNALRQEGLVKGKDDTWKWGTSFQGSSSSVWETSHLHFRQLRYHETSGPQEALSRLRELCRRWLRPEARTKAQILELLVLEQFLSILPGEIRTWVQLHHPGSGEEAVALVEELQKDLDGPAIQVPVLVKDQDTLQKVVSAPGTTLPPVLPGSHIAAEICPHPPTDLVAFNLQDPQHDSPAPEASALSQEENPRNQLMALMLLTAQPQELVMFEEVSVCFTSEEWACLGPIQRALYWDVMLENYGNVTSLEWETMTENEEVTSKPSSSQRADSHKGTSKRLQGSVPQVLDFEEECEWQVLASQWGNETDERADTV

SEQ ID NO: 345845 - DNA, 4338 bp, Artificial Sequence
  derived and/or modified sequence
agtattctcggctcggccattattctgtgcctcggctgccggaagggctcgttcctgtgtcatctcctagcggcctggcgccgaggcggcggtacgcaaggctggagccgcagcgggagcccccgatgatactctccaagctgtaaggaagaagtcaaggattaaggagacctggactggagaggagcctttttcaaaaaacaacaatgacaagagaaaatgtagcccacaatgctctgagacaagagggccttgtgaaggggaaggatgatacctggaaatggggaaccagcttccaaggaagtagctcctctgtttgggagacctcccacctacactttagacaattacgttaccatgagacatctggaccccaggaagccctgagccggctcagggaactctgtcgccggtggctgagaccagaagcacgcaccaaggcacagatcctggagctgctggtgctggagcagtttctgagcatcctgcctggggagattcggacctgggtacagctccatcaccctggaagtggcgaggaggctgtggccctggtagaggagctgcagaaagaccttgatggaccagcaatacaagttccagtccttgtcaaggatcaggacactctccagaaggtggtgagtgccccaggaacaacacttcctcctgtacttcctggcagccacatagcagctgaaatttgcccgcatcctcctactgacctagtggcattcaacctccaggatcctcagcatgattctcctgcccctgaagcttctgccctttcccaggaagagaacccaagaaatcaattaatggcacttatgctcctaacagcccagccccaggagttggtgatgttcgaggaggtgtcagtatgcttcacttcagaggaatgggcatgtctgggcccaatccagagggccttgtactgggatgtgatgctggagaattatggaaatgtgacctccctagaatgggagaccatgaccgagaatgaggaggtgacatcaaagccaagtagttctcaaagagcagactctcataaaggaacatcaaaaagacttcaaggaagtgttccccaggtccttgattttgaagaagagtgtgaatggcaagttttggcaagtcagtggggaaatgaaacagatgaaagggcagatacagtgaagaaagtttccctttgtgaacgagacaagaagaaaaggactccaccagagaaacaaggccaaaagtggaaggaattaggagacagcttgactttcggttcagctatttctgaaagtttaataggtactgaaggaaagaagttttataaatgtgatatgtgttgtaaacattttaataaaatctcccatcttataaaccatcggagaatccacactggtgagaaacctcataaatgtaaggaatgtggaaaaggctttattcagcgttcgagccttctaatgcatttacggaaccattcaggggagaaaccttataaatgtaatgaatgtgggaaagcattttctcaaagtgcttaccttctaaaccatcagaggatccacactggggagaaaccttataagtgtaaggagtgtggaaagggcttctataggcactcaggcctaattatacatctaaggcgccattcaggggagagaccttataagtgtaatgaatgtgggaaagtcttctctcagaatgcttacctcattgaccatcagaggctccacaaaggggaagaaccttataaatgtaataagtgtcagaaagctttcattctgaagaagagcctcattctgcaccagagaatccactctggggaaaaaccctataaatgtgatgaatgtggaaagacctttgctcagaccacttatcttattgaccatcagcgactccacagtgcagagaacccttacaagtgtaaagaatgtggaaaagttttcattcgaagcaaaagcctcctcttacatcagagagtccacacagaaaagaaaacctttggttgtaaaaagtgtgggaagattttcagttctaagtcaaacttcattgaccataagaggatgcacagcagagagaaaccttacaaatgcactgaatgtgggaaagcctttactcaaagtgcttacctttttgaccaccagagactccacaatggggagaagccctatgaatgtaatgaatgtgggaaagtttttattctgaagaagagcctcattttacatcaaaggttccacactggagagaatctctatgaatgtaaagattgtggtaaggtcttcggttcaaacagaaacctcattgaccatgagagactccacaatggggagaagccatatgaatgtcgagagtgtgggaaaacctttattatgagcaaaagttttatggtccatcagaaactccatacacaagagaaagcctacaaatgtgaggattgtgggaaggctttcagttacaattcaagcctgcttgtacatcggagaatccacaccggagaaaaaccctttgaatgcagtgagtgtggaagagctttcagttcaaacagaaacctcattgagcataagagaatccacagtggtgagaaaccctatgagtgtgatgagtgtggcaaatgcttcattctgaagaaaagcctcattggacatcagagaattcacacgagggaaaaatcttataaatgcaatgactgtgggaaggtcttcagttaccgctcaaaccttatagcccatcagaggatccatactggtgagaagccctatgcgtgtagtgagtgtggaaaaggttttacgtacaacagaaacctgattgaacatcaaagaattcacagtggagaaaaaacctacgaatgtcatgtatgtaggaaagtccttacctctagtagaaatcttatggtacatcaaagaatccatactggagagaaaccttataaatgtaatgagtgtggaaaagactttagtcagaataaaaaccttgttgtacatcagagaatgcacactggggaaaaaccttatgagtgtgacaagtgtaggaaatcctttacttctaagaggaatttagttggccaccagagaattcacacaggggagaaaccctatgggtgtaatgattgtagtaaagtttttaggcaaagaaaaaaccttactgtacatcagaaaatccacacagatgaaaaaccttgtgaatgtgatgtgtctgaaaaagaattctctcagacttccaaccttcatcttcaacagaaaatccataccattgaggaattctcttggctacaaaacaccaatgagtccaagattgagattcagaaaatctagtgtcatatgtaaaatggaatagaatccctgcctacttaagtaactgttggacaaatgatatatatttcttctaaggaaaaagtttattatttactctttactagacaaatgagtagcatatagaagaaagttaataggccgggcttggtggctcatgcctgtaatcccagcactttgagaggccgaagcgagtggatcacctgaggtcaggattttgagaccagcctgaccaacatggtgaaaccccatctctactaaaatacaaaaattatccgggcatgggggcacacaccggtaatcccagctactcaggaggctgagacaggagagtcgcttgaacctgggagggcggaggttgcagtgagccaggatcgcgccattgcactccagcctgggcaacaagagcgaaactcttgtctgaaaaaataaagttcatcccaactttcaagtctacaaaaacataatccaaatctaataacatagttgtaaatgagagcaacaataaaaagtagacatgggctgggtgcagtggctcactcctgtagtcccaggactttgggaggccgaggtgggaagatcccttgagcccaggagttcgagacaagcctgggtaacacggggagacccgtctttagtaaataaaaataaatttattaataaaactaaaaatttaataataaaaagtggacattgttttttaaaatgtgtatagtatgcattttaaagatagtgtcactgctgtggaaaacctgaacagacagtatgatccagaatgtcaggtgtggagttgggcggacaagagtctgctgatgaggacaacctaaaagagcactggatttggaatcagaagacctacctttgattcctggctttcccttaatggccatgtgatgttattaagtcagcctctaaagctttagtttcctgtcagtcaaatgttgacatgatacctacctcacagggttgttgtgagggttaagtgaaaggatctttgtgaaagtactttttgaaatcattcagttgtcaataaagttggataaaa

SEQ ID NO: 345846 - DNA, 3090 bp, Artificial Sequence
  derived and/or modified sequence
atgaccagagagaacgtggcccacaacgccctgagacaggagggcctggtgaagggcaaggacgacacctggaagtggggcaccagcttccagggcagcagcagcagcgtgtgggagaccagccacctgcacttcagacagctgagataccacgagaccagcggcccccaggaggccctgagcagactgagagagctgtgcagaagatggctgagacccgaggccagaaccaaggcccagatcctggagctgctggtgctggagcagttcctgagcatcctgcccggcgagatcagaacctgggtgcagctgcaccaccccggcagcggcgaggaggccgtggccctggtggaggagctgcagaaggacctggacggccccgccatccaggtgcccgtgctggtgaaggaccaggacaccctgcagaaggtggtgagcgcccccggcaccaccctgccccccgtgctgcccggcagccacatcgccgccgagatctgcccccacccccccaccgacctggtggccttcaacctgcaggacccccagcacgacagccccgcccccgaggccagcgccctgagccaggaggagaaccccagaaaccagctgatggccctgatgctgctgaccgcccagccccaggagctggtgatgttcgaggaggtgagcgtgtgcttcaccagcgaggagtgggcctgcctgggccccatccagagagccctgtactgggacgtgatgctggagaactacggcaacgtgaccagcctggagtgggagaccatgaccgagaacgaggaggtgaccagcaagcccagcagcagccagagagccgacagccacaagggcaccagcaagagactgcagggcagcgtgccccaggtgctggacttcgaggaggagtgcgagtggcaggtgctggccagccagtggggcaacgagaccgacgagagagccgacaccgtgaagaaggtgagcctgtgcgagagagacaagaagaagagaaccccccccgagaagcagggccagaagtggaaggagctgggcgacagcctgaccttcggcagcgccatcagcgagagcctgatcggcaccgagggcaagaagttctacaagtgcgacatgtgctgcaagcacttcaacaagatcagccacctgatcaaccacagaagaatccacaccggcgagaagccccacaagtgcaaggagtgcggcaagggcttcatccagagaagcagcctgctgatgcacctgagaaaccacagcggcgagaagccctacaagtgcaacgagtgcggcaaggccttcagccagagcgcctacctgctgaaccaccagagaatccacaccggcgagaagccctacaagtgcaaggagtgcggcaagggcttctacagacacagcggcctgatcatccacctgagaagacacagcggcgagagaccctacaagtgcaacgagtgcggcaaggtgttcagccagaacgcctacctgatcgaccaccagagactgcacaagggcgaggagccctacaagtgcaacaagtgccagaaggccttcatcctgaagaagagcctgatcctgcaccagagaatccacagcggcgagaagccctacaagtgcgacgagtgcggcaagaccttcgcccagaccacctacctgatcgaccaccagagactgcacagcgccgagaacccctacaagtgcaaggagtgcggcaaggtgttcatcagaagcaagagcctgctgctgcaccagagagtgcacaccgagaagaagaccttcggctgcaagaagtgcggcaagatcttcagcagcaagagcaacttcatcgaccacaagagaatgcacagcagagagaagccctacaagtgcaccgagtgcggcaaggccttcacccagagcgcctacctgttcgaccaccagagactgcacaacggcgagaagccctacgagtgcaacgagtgcggcaaggtgttcatcctgaagaagagcctgatcctgcaccagagattccacaccggcgagaacctgtacgagtgcaaggactgcggcaaggtgttcggcagcaacagaaacctgatcgaccacgagagactgcacaacggcgagaagccctacgagtgcagagagtgcggcaagaccttcatcatgagcaagagcttcatggtgcaccagaagctgcacacccaggagaaggcctacaagtgcgaggactgcggcaaggccttcagctacaacagcagcctgctggtgcacagaagaatccacaccggcgagaagcccttcgagtgcagcgagtgcggcagagccttcagcagcaacagaaacctgatcgagcacaagagaatccacagcggcgagaagccctacgagtgcgacgagtgcggcaagtgcttcatcctgaagaagagcctgatcggccaccagagaatccacaccagagagaagagctacaagtgcaacgactgcggcaaggtgttcagctacagaagcaacctgatcgcccaccagagaatccacaccggcgagaagccctacgcctgcagcgagtgcggcaagggcttcacctacaacagaaacctgatcgagcaccagagaatccacagcggcgagaagacctacgagtgccacgtgtgcagaaaggtgctgaccagcagcagaaacctgatggtgcaccagagaatccacaccggcgagaagccctacaagtgcaacgagtgcggcaaggacttcagccagaacaagaacctggtggtgcaccagagaatgcacaccggcgagaagccctacgagtgcgacaagtgcagaaagagcttcaccagcaagagaaacctggtgggccaccagagaatccacaccggcgagaagccctacggctgcaacgactgcagcaaggtgttcagacagagaaagaacctgaccgtgcaccagaagatccacaccgacgagaagccctgcgagtgcgacgtgagcgagaaggagttcagccagaccagcaacctgcacctgcagcagaagatccacaccatcgaggagttcagctggctgcagaacaccaacgagagcaagatcgagatccagaagatctag

SEQ ID NO: 345847 - DNA, 966 bp, Artificial Sequence
  derived and/or modified sequence
atgaccagagagaacgtggcccacaacgccctgagacaggagggcctggtgaagggcaaggacgacacctggaagtggggcaccagcttccagggcagcagcagcagcgtgtgggagaccagccacctgcacttcagacagctgagataccacgagaccagcggcccccaggaggccctgagcagactgagagagctgtgcagaagatggctgagacccgaggccagaaccaaggcccagatcctggagctgctggtgctggagcagttcctgagcatcctgcccggcgagatcagaacctgggtgcagctgcaccaccccggcagcggcgaggaggccgtggccctggtggaggagctgcagaaggacctggacggccccgccatccaggtgcccgtgctggtgaaggaccaggacaccctgcagaaggtggtgagcgcccccggcaccaccctgccccccgtgctgcccggcagccacatcgccgccgagatctgcccccacccccccaccgacctggtggccttcaacctgcaggacccccagcacgacagccccgcccccgaggccagcgccctgagccaggaggagaaccccagaaaccagctgatggccctgatgctgctgaccgcccagccccaggagctggtgatgttcgaggaggtgagcgtgtgcttcaccagcgaggagtgggcctgcctgggccccatccagagagccctgtactgggacgtgatgctggagaactacggcaacgtgaccagcctggagtgggagaccatgaccgagaacgaggaggtgaccagcaagcccagcagcagccagagagccgacagccacaagggcaccagcaagagactgcagggcagcgtgccccaggtgctggacttcgaggaggagtgcgagtggcaggtgctggccagccagtggggcaacgagaccgacgagagagccgacaccgtgtag

SEQ ID NO: 345848 - DNA, 3090 bp, Artificial Sequence
  derived and/or modified sequence
atgactcgtgagaatgttgctcataatgcactccgacaagaaggactcgtcaagggaaaagatgacacctggaagtgggggacaagttttcagggctcctccagctccgtgtgggagacctctcacttacatttccggcagctgagatatcatgaaacaagcggaccccaggaggctctcagcagactcagggaactctgccgccggtggttgcggcccgaggcccgaaccaaagcgcagatccttgagttgctggttctcgaacagtttttgtccatcttgcctggcgagattcgaacttgggtccaactccaccatcctgggtccggggaagaggcagtagccctcgtagaagaactgcagaaggacctggatggacctgcgattcaagttcccgtcttggtcaaggaccaagacacgctccagaaggtggtcagcgcgcccggtaccactttgccaccagtgcttccggggtctcacattgcagccgagatttgtcctcacccccccactgatctagtcgcatttaatctgcaggacccacagcatgatagccctgccccagaggcatctgctctaagccaggaggaaaatccacggaatcagctgatggccctgatgctgctgaccgcgcagccccaggaactggttatgttcgaggaagtttctgtttgctttactagcgaagaatgggcctgcctcggcccaattcagagagccctgtactgggacgttatgctagaaaactatgggaacgtaacctctctagagtgggagacgatgaccgaaaacgaagaagtgaccagcaaaccttcgtcttcccagagggctgacagtcataaaggcacatccaagcggctgcaaggaagcgtgccacaggtattggattttgaagaggagtgtgaatggcaggtgctggctagccaatggggaaacgagactgacgagcgtgctgatacggttaagaaagtcagcttgtgtgaaagggacaaaaagaaacgcaccccccccgagaaacaaggacagaaatggaaagagcttggagacagtctgacattcggcagcgctatctctgaatctctgatcggaactgagggcaaaaagttttacaagtgtgacatgtgctgcaaacattttaataagatctcccatctgatcaaccaccgaaggatccatactggggagaaaccacacaaatgtaaggagtgcggtaagggattcatacagcgctcctctctgctgatgcacttacggaaccactctggcgagaagccctacaagtgcaatgagtgcggcaaggcattcagtcagtccgcatacttactgaaccaccagcgaatccacactggtgagaaaccctataagtgtaaagagtgtgggaagggattttataggcattccggcttaatcattcatttgagacgacattccggcgagcgtccctacaagtgcaacgagtgtgggaaagtcttctcacagaatgcgtatctcattgaccaccaaagactccataagggagaggagccgtacaagtgcaacaagtgccagaaggcttttatcctgaagaaaagtctgattttgcaccaacgcattcattcgggggagaagccatacaaatgcgatgaatgcggtaaaaccttcgcccaaacaacgtacctcatagatcaccagagactccattcagccgagaacccatacaagtgtaaagagtgtgggaaggtattcatccgctctaagagtttgctactccatcagagagttcacactgagaagaagactttcgggtgtaagaagtgcggcaaaatattctcatctaagtcaaacttcatagaccacaaacgtatgcattctcgcgaaaagccatataaatgcaccgaatgtggaaaagccttcactcagagcgcatatttattcgaccatcaacggttgcataacggcgagaagccatacgagtgtaacgagtgtggaaaagtgttcatcctgaagaagtccctgatactgcatcaacgttttcacaccggcgagaatttatatgagtgcaaggactgcggcaaggtgttcggaagcaatcgaaacttgattgatcacgaacgcctgcacaacggcgaaaagccgtacgaatgtagggagtgcgggaagaccttcataatgagcaagtctttcatggtgcaccagaaactgcacacacaggagaaggcttataagtgtgaggactgtggcaaagcattcagttataattcctccttgctggtgcaccgccgtatacacacgggcgagaaaccttttgaatgtagcgagtgtggtagggccttctcgagcaatcgcaatctcattgagcataaacggatccacagtggagaaaaaccatacgaatgtgatgagtgtgggaaatgttttattctgaaaaagtccctcatcgggcaccagagaatacatacgcgcgagaaatcctataagtgtaatgactgcggaaaagtattttcataccgctctaaccttatagcgcatcagcgcatccacacgggagagaaaccctatgcctgctctgagtgtggtaaaggcttcacatacaatcggaaccttattgagcaccagcggattcactctggggagaaaacttatgagtgccatgtctgccgtaaggtgcttacttcatctcgtaatttgatggtgcaccagcggatccacacgggggagaagccttataaatgtaacgagtgtggcaaagatttctcgcagaataaaaatctggtggtgcaccagagaatgcacacaggcgagaagccctatgagtgtgacaagtgccgcaagtctttcacttccaaacgcaaccttgttggccaccagcgcatccacaccggtgaaaaaccttatggctgtaacgattgtagtaaggtgtttcggcagagaaagaacctgacagtccaccagaaaattcataccgatgagaaaccatgcgagtgcgacgtctcagagaaggaattctcacagacgagtaacctgcatctgcagcagaaaatccacacaatcgaagaattcagttggctgcagaacacaaatgaaagtaagattgaaatccaaaagatttag

SEQ ID NO: 345849 - DNA, 3090 bp, Artificial Sequence
  derived and/or modified sequence
atgaccagagagaacgtcgcccacaatgcactgcggcaggagggcctggtaaaaggtaaggatgacacctggaaatggggaacgagctttcagggcagttcctcgagcgtttgggagacctcacatctccatttccggcagttgaggtatcacgagaccagtggccctcaggaagccttgagcagacttcgagagctgtgccgcaggtggctgcgtcccgaggcacgtacgaaagcacagatactggaactgctggtgctggagcagttcctatccatacttcccggggagataagaacctgggtgcaattacaccacccagggtctggagaggaggccgtggctctggtcgaggaactgcagaaggacctagacggccctgctattcaggtaccggtacttgtgaaggaccaagacaccctgcagaaagtggtgtctgctcccggcacaaccctacctcctgtgctgcccgggtcacatattgctgctgaaatatgtcctcatccaccgactgacctggtggcattcaatcttcaggatcctcaacacgactctccagcgccggaggccagcgccctatctcaggaggagaatccgcggaatcagttgatggcgctcatgctgctaaccgcacagcctcaagagctggtcatgttcgaagaggtcagtgtctgctttacatccgaggagtgggcttgcctgggtcccatacaacgggcactctattgggacgttatgctcgaaaactacggtaatgttaccagtttggaatgggaaacaatgacagaaaacgaggaggtaacatctaagccatcttcttcccagcgagctgactcacacaagggcacctctaagaggttgcagggaagcgtgccacaagtcctcgattttgaagaggagtgcgaatggcaggtattagcctctcaatggggtaacgaaaccgacgagcgagctgatacagtaaaaaaagtgtcattgtgtgagcgggacaagaagaagaggactccgcccgagaagcaggggcaaaaatggaaagaactcggagattctctgacatttggctccgcgatttcagaatctctcattggaaccgaagggaaaaaattctacaaatgtgacatgtgctgtaaacacttcaataaaatctcacaccttattaatcaccgccgtatccataccggagagaagccccacaagtgcaaggaatgtggaaaaggatttatccaacggagctctttattaatgcacctgagaaatcacagcggggagaagccctacaagtgcaacgagtgtggaaaagccttttcacaatcggcatacctgcttaatcatcagagaatacacaccggagaaaagccctacaagtgcaaagagtgtggaaagggattctataggcatagcggtctcattatccatcttagacgccatagcggggagcggccttataaatgtaatgagtgcggtaaggtgtttagccagaatgcctatttgatcgatcaccagagactgcataagggggaagagccatataaatgtaataaatgccaaaaagctttcatcctgaaaaagtccctgatcctccatcagcgcatccatagcggagagaagccttataagtgcgatgagtgtggcaaaacgtttgcccagactacatacctgattgatcaccagagacttcactcagccgaaaatccctataagtgtaaagagtgtgggaaggtttttattcgaagtaagagtttgctgctgcatcagcgcgtccatacggagaagaaaacattcggttgcaaaaaatgcggtaagatttttagttcgaaatccaacttcatagaccacaagaggatgcattcccgcgagaaaccctataagtgcaccgaatgcggcaaagcgttcacccagtctgcctaccttttcgaccaccaacgacttcataacggcgagaagccgtatgaatgtaacgaatgtggaaaggtcttcatactgaagaagtctctgatacttcaccagcggtttcatacgggtgagaacttgtacgagtgcaaggattgcggaaaggtattcgggagcaatcggaatcttatcgaccacgaacgtttgcacaatggcgagaaaccctacgaatgccgggagtgcggcaagaccttcatcatgtctaagtcgttcatggttcaccagaagctccatacacaagagaaggcctataaatgtgaagactgcggcaaggcattcagctataattcatcattgctggtgcataggaggatacataccggcgagaagccatttgagtgcagtgaatgtggccgagcgttctcctcgaatagaaacctgatcgagcataagcggattcatagtggagagaaaccctacgaatgtgacgaatgcggaaagtgcttcatactgaagaaatctctgatcggccaccagagaatccacactcgcgagaaatcttataagtgcaatgattgcggaaaagtgttttcttatcggagtaatctgatagcacatcaacgcattcacacaggtgaaaagccctacgcttgtagcgagtgtggcaagggctttacttacaaccgcaacttgatcgagcatcagcggatacactccggcgaaaagacgtacgaatgccacgtttgccgaaaggtgcttactagttcgaggaacctgatggtccaccagcgtattcataccggagagaagccgtacaagtgcaatgagtgtggtaaggacttctctcagaacaagaatctcgtcgtccatcagaggatgcacactggggagaagccatacgagtgtgacaaatgccggaaatcctttaccagcaaacggaatttggttggtcaccagagaatacacaccggggaaaagccatatggctgtaatgactgcagcaaggttttccgtcagaggaaaaatttgactgtgcaccaaaaaatccacaccgatgagaagccatgcgaatgcgatgtgtcagagaaagaattttctcaaacatccaatctgcatctccagcagaagatacacacgatagaagaatttagttggttacagaacaccaatgagtctaaaattgaaatacagaagatttag

SEQ ID NO: 345850 - DNA, 966 bp, Artificial Sequence
  derived and/or modified sequence
atgacaagagagaacgttgctcacaatgcacttcgacaggagggattggtgaagggcaaggatgatacatggaaatggggcacctctttccagggttcaagttcttcagtgtgggaaacttctcacttgcatttccggcagcttcgctaccacgaaacctccggcccacaggaggcccttagtcggctgagagagctttgtagaagatggcttcgccccgaagcccggacgaaggcccaaattcttgaactgctggtgctggagcagtttctctcaattctgcctggtgagattagaacatgggtgcaactgcaccatccagggagcggagaagaggcagtcgcacttgttgaagagctgcaaaaggacctcgacggccccgcgattcaggtgccggtgctggtaaaggaccaggatacactccaaaaagttgttagcgctcctggtacaacactgccgcctgtcttgccgggttcccacattgctgcagagatctgcccacatcctcccaccgacctggtggcatttaatttgcaggatccccagcacgactcccccgctcccgaggccagcgcactgtcccaagaggagaatccaagaaatcagctgatggccctgatgctgctgacggctcagccccaggagctggtgatgttcgaggaggtgtctgtatgcttcacttctgaagagtgggcttgtcttggtccgatccagagggctctctactgggacgtgatgctcgaaaactacggaaacgtcacatctcttgagtgggaaactatgactgagaacgaggaggtcacttcaaaacctagcagcagtcagcgggcagacagccacaaaggtacgtctaagaggctgcagggcagcgttccccaggtactggatttcgaagaagaatgtgagtggcaggtactggccagccagtggggcaatgagacagatgagagagccgacacagtgtag

SEQ ID NO: 345851 - DNA, 3090 bp, Artificial Sequence
  derived and/or modified sequence
atgacccgggagaatgtggcccacaatgccctgcggcaggagggcctggtgaagggcaaggatgacacctggaagtggggcaccagcttccagggcagcagcagctctgtgtgggagaccagccacctgcacttccggcagctgcgctaccacgagaccagcggcccccaggaggccctgagccggctgcgggagctgtgccgccgctggctgcggcctgaggcccggaccaaggcccagatcctggagctgctggtgctggagcagttcctgagcatcctgcctggagagatccgcacctgggtgcagctgcaccaccctggcagcggggaggaggccgtggccctggtggaggagctgcagaaggacctggatggccctgccatccaggtgcctgtgctggtgaaggaccaggacaccctgcagaaggtggtgtctgcccctggcaccaccctgccccctgtgctgcccggcagccacatcgctgctgagatctgcccccaccccccaacagacctggtggccttcaacctgcaggacccccagcacgacagccctgcccctgaggccagcgccctgagccaggaggagaaccccaggaaccagctgatggccctgatgctgctgacagcccagccccaggagctggtgatgtttgaggaggtgtctgtgtgcttcaccagcgaggagtgggcctgcctgggccccatccagagggccctgtactgggatgtgatgctggagaactatggaaatgtgaccagcctggagtgggagaccatgacagaaaatgaggaggtgaccagcaagcccagcagcagccagagagctgacagccacaagggcaccagcaagaggctgcagggctctgtgccccaggtgctggactttgaggaggagtgtgagtggcaggtgctggccagccagtggggcaatgaaacagatgaaagagctgacacagtgaagaaggtgtccctgtgtgagcgggacaagaagaagaggaccccacctgagaagcagggccagaagtggaaggagctgggggacagcctgacctttggaagtgccatcagcgagagcctcatcggcacagagggcaagaagttctacaagtgtgacatgtgctgcaagcacttcaacaagatcagccacctgatcaaccaccggcgcatccacactggagagaagccccacaagtgcaaggaatgtgggaagggcttcatccagaggagcagcctgctgatgcacctgaggaaccacagcggggagaagccctacaagtgcaatgaatgtgggaaggccttcagccagagcgcctacctgctgaaccaccagaggatccacactggagagaagccctacaagtgcaaggaatgtgggaagggcttctaccgccacagcggcctcatcatccacctgcggcggcacagcggggagcggccctacaagtgcaatgaatgtgggaaggtgttcagccagaatgcctacctgattgaccaccagaggctgcacaagggggaggagccctacaagtgcaacaagtgccagaaggccttcatcctgaagaagagcctcatcctgcaccagaggatccacagcggggagaagccctacaagtgtgatgaatgtgggaagacctttgcccagaccacctacctgattgaccaccagaggctgcacagcgctgagaacccctacaagtgcaaggaatgtgggaaggtgttcatccgcagcaagagcctgctgctgcaccagagggtgcacacagagaagaagaccttcggctgcaagaagtgtgggaagatcttcagcagcaagagcaacttcatcgaccacaagaggatgcacagccgggagaagccctacaagtgcacagaatgtgggaaggccttcacccagagcgcctacctgtttgaccaccagaggctgcacaatggagagaagccctatgaatgtaatgaatgtgggaaggtgttcatcctgaagaagagcctcatcctgcaccagcgcttccacactggagagaacctgtatgagtgcaaggactgtgggaaggtgtttggcagcaacagaaacctgattgaccacgagcggctgcacaatggagagaagccctatgaatgtcgggagtgtgggaagaccttcatcatgagcaagagcttcatggtgcaccagaagctgcacacccaggagaaggcctacaagtgtgaggactgtgggaaggccttctcctacaacagcagcctgctggtgcaccggcgcatccacactggagagaagccctttgaatgttctgaatgtggccgggccttcagcagcaacagaaacctgattgagcacaagaggatccacagcggggagaagccctatgaatgtgatgaatgtgggaagtgcttcatcctgaagaagagcctcatcggccaccagaggatccacacccgggagaagagctacaagtgcaatgactgtgggaaggtgttctcctaccgcagcaacctgattgcccaccagaggatccacactggagagaagccctatgcctgcagtgaatgtgggaagggcttcacctacaacagaaacctgattgagcaccagaggatccacagcggggagaagacctatgaatgtcatgtgtgcaggaaggtgctgaccagcagcaggaacctgatggtgcaccagaggatccacactggagagaagccctacaagtgcaatgaatgtgggaaggacttcagccagaacaagaacctggtggtgcaccagaggatgcacactggagagaagccctatgaatgtgacaagtgcaggaagagcttcaccagcaagaggaacctggtgggccaccagaggatccacactggagagaagccctacggctgcaatgactgcagcaaggtgttccggcagaggaagaacctgactgtgcaccagaagatccacacagatgagaagccctgtgaatgtgatgtgtctgagaaggagttcagccagaccagcaacctgcacctgcagcagaagatccacaccatcgaggagttctcctggctgcagaacaccaatgaaagcaagattgagatccagaagatctag

SEQ ID NO: 345852 - DNA, 966 bp, Artificial Sequence
  derived and/or modified sequence
atgacccgggagaatgtggcccacaatgccctgcggcaggagggcctggtgaagggcaaggatgacacctggaagtggggcaccagcttccagggcagcagcagctctgtgtgggagaccagccacctgcacttccggcagctgcgctaccacgagaccagcggcccccaggaggccctgagccggctgcgggagctgtgccgccgctggctgcggcctgaggcccggaccaaggcccagatcctggagctgctggtgctggagcagttcctgagcatcctgcctggagagatccgcacctgggtgcagctgcaccaccctggcagcggggaggaggccgtggccctggtggaggagctgcagaaggacctggatggccctgccatccaggtgcctgtgctggtgaaggaccaggacaccctgcagaaggtggtgtctgcccctggcaccaccctgccccctgtgctgcccggcagccacatcgctgctgagatctgcccccaccccccaacagacctggtggccttcaacctgcaggacccccagcacgacagccctgcccctgaggccagcgccctgagccaggaggagaaccccaggaaccagctgatggccctgatgctgctgacagcccagccccaggagctggtgatgtttgaggaggtgtctgtgtgcttcaccagcgaggagtgggcctgcctgggccccatccagagggccctgtactgggatgtgatgctggagaactatggaaatgtgaccagcctggagtgggagaccatgacagaaaatgaggaggtgaccagcaagcccagcagcagccagagagctgacagccacaagggcaccagcaagaggctgcagggctctgtgccccaggtgctggactttgaggaggagtgtgagtggcaggtgctggccagccagtggggcaatgaaacagatgaaagagctgacacagtgtag

SEQ ID NO: 345853 - DNA, 3090 bp, Artificial Sequence
  derived and/or modified sequence
atgacccgggagaacgtggcccacaacgccctgcggcaggagggcttagtcaaagggaaagacgacacttggaagtgggggacttcattccagggttccagctcatccgtatgggagacgagccaccttcatttcaggcagttacgataccatgagactagcggacctcaggaggcactcagcaggttacgggaactttgccggaggtggttgagacctgaagcacggaccaaagcccagattctggagctgctcgtccttgagcaattcctgtccatcctgccaggagagatccgtacttgggtgcagctccaccaccccgggagcggagaagaagcagttgccctggtggaagagctccagaaggacctggacgggcccgcaatccaggtgcctgtgttggttaaggaccaagacactttgcaaaaggtcgtgtccgcccctggcacgaccttgcctcccgtcctgccagggagtcatatcgctgctgaaatatgcccacatccaccaacggatctggtggctttcaacctgcaagacccacagcacgactctcctgcccccgaagccagcgcgctgagtcaggaagagaaccctcgaaatcaactgatggctcttatgctgttgacagcccaaccccaggaacttgtaatgttcgaggaagtttcagtctgctttacatctgaggagtgggcatgcctgggacccatacagcgcgcattgtactgggacgtgatgttagaaaactatgggaacgtgactagccttgagtgggagacgatgacagagaacgaggaggtcacttctaagcctagctccagtcagcgcgcagactcccacaagggaacgagtaagagacttcaaggatctgtgccgcaagtgttggacttcgaagaagagtgcgagtggcaggtactggcatcccagtggggcaacgaaacagatgaaagggccgatacagttaaaaaggtgtcattgtgcgagcgcgacaaaaagaaacgcacgcccccagagaaacaggggcagaaatggaaggaactgggcgattccctgactttcggtagcgcaatttcggagagcttgattggaacagaaggcaaaaagttctacaagtgcgacatgtgctgtaagcactttaacaagatctcccacctgataaaccacagaaggattcatacgggggagaagccgcacaagtgtaaagaatgtgggaagggcttcatccagcgcagttctcttctgatgcacctgcggaaccatagcggggaaaagccttacaagtgtaacgaatgtggtaaggcattttctcagtctgcttacttgctcaatcaccagaggattcacacaggggagaagccctacaaatgcaaggaatgcggtaagggattctatcgtcactctggcctgattattcatctacgccgacactcaggcgagaggccctacaagtgtaacgaatgtggaaaggtgttcagccagaacgcatacctgatagatcaccagaggcttcataaaggggaggagccatacaaatgtaacaaatgtcagaaagcctttatcctgaagaaatctttgatcctgcaccagcgcattcattcaggagaaaagccgtacaaatgtgacgagtgtggcaaaacgttcgcccagaccacatatctaattgaccatcaaaggctgcacagcgcggagaatccctataaatgcaaagaatgcggaaaagtgttcattaggtcaaagtccttgctccttcaccagcgtgtgcacactgaaaagaaaaccttcggttgtaaaaagtgcggtaagatattctcctctaagtcaaactttatcgatcacaagcgtatgcacagccgcgagaaaccatacaagtgcaccgagtgcggaaaggcctttacccagagtgcctatctattcgatcaccagaggctccacaatggcgagaagccttatgagtgcaatgaatgtggcaaagtgtttatcctgaaaaaatcactgatcttgcatcagaggttccatacaggagaaaatctttacgagtgcaaggattgcggaaaggtctttggctcaaatagaaaccttatagatcacgagcgtttacataatggcgagaaaccctacgaatgccgcgagtgcggaaagacctttatcatgagcaagtctttcatggtccaccaaaaattgcatactcaggagaaggcttacaagtgcgaggattgcggcaaggcattttcatacaactcctcacttctggtacaccgaagaatccatacaggagagaaaccctttgaatgcagcgagtgcggcagggccttctcttccaacaggaacctcatcgagcacaaaaggatccacagcggcgagaaaccttatgagtgtgacgagtgtggcaaatgcttcattctgaagaagtccttgatagggcaccagaggatccatacccgggagaaaagctacaagtgcaacgattgcggcaaagtgttcagctacagaagcaatctcatcgctcaccagcggattcacacaggagaaaagccgtacgcttgctcagagtgcggcaaaggattcacctataatcgcaatctaatcgaacatcagagaattcattctggggaaaaaacttacgagtgccatgtgtgccggaaggtgttaacatccagtagaaacttgatggttcatcagcgcattcataccggagagaagccttacaagtgcaacgaatgtgggaaggacttctcccagaataaaaacctcgtggtccatcaacgcatgcacaccggcgagaagccgtacgaatgcgacaaatgtagaaagtcgttcaccagtaaacgcaatctggtgggacaccagcgtatccataccggagaaaagccctacggttgtaacgattgttctaaagtgttcagacaacgaaagaacctcaccgtccatcagaagattcatactgatgagaagccctgcgaatgcgatgtcagcgaaaaggaattctcccagaccagtaacctgcacctgcagcagaaaatccatactatcgaggagttcagctggcttcagaatacaaacgagtcaaagatcgaaatccagaagatctag

SEQ ID NO: 345854 - DNA, 3090 bp, Artificial Sequence
  derived and/or modified sequence
atgacccgggagaacgtggcccacaacgccctgcggcaggagggccttgtcaagggcaaggatgatacgtggaaatgggggacatccttccagggttcctccagctctgtttgggaaacctcccatctgcatttccgccagcttaggtatcacgagacatccggaccccaggaagcgctgagtcggctgcgggagctgtgccgtagatggctgcgccctgaagcccgcaccaaagctcagatcctggaactgcttgttcttgagcaattcttatcgatacttcccggcgaaatccgcacctgggtccagctacaccatcctggttcaggagaagaggccgtggctcttgtggaagaactgcaaaaggatctggatggtcccgccattcaagtcccggttctggtgaaggatcaggataccctgcagaaggttgtgtcagcccctggaaccacattacctccagtcctgccaggctcccatatcgccgccgaaatctgtccccatccccccaccgatctggtggcatttaacctccaggatccccaacatgattctcccgctcccgaggcctctgctctttctcaggaggagaaccccagaaaccaactgatggcattaatgttgttgacagcgcagccacaggagctcgtgatgttcgaagaagtttccgtgtgttttacctctgaggaatgggcttgtctgggaccaatacagcgggccctctactgggacgttatgttggagaattatggcaacgttacttcactcgagtgggaaaccatgacagaaaatgaggaggttactagtaagcccagcagctcacagcgtgccgatagccataaaggaacctctaaacggctgcaggggtcagtaccacaggtattagatttcgaggaagagtgtgagtggcaagtgttagctagccagtgggggaacgagacagacgaacgagctgatacagtaaaaaaagtgtccttatgcgagcgggacaagaagaagcggacgccccccgagaagcagggacagaagtggaaagaactcggagatagcctgaccttcggaagcgcaatttcagagtctctcattgggactgaaggaaagaagttttataagtgtgacatgtgctgtaaacattttaacaagatcagccacctcattaaccatcgtagaatacatactggggaaaagccccacaagtgcaaggagtgcggaaaaggatttatccagcgatccagtttgttgatgcatctgagaaaccactcgggagagaaaccatataaatgtaacgagtgcggtaaggccttctcccagagtgcctacctcttgaatcatcaaagaattcatacaggggagaagccatacaaatgtaaggaatgtggtaaagggttttaccgtcactccggtctgatcatccatctgcgacgccacagcggcgagcgtccatacaagtgcaatgaatgcggcaaggtatttagccaaaacgcgtatctgattgatcaccaacggctgcataagggtgaggagccgtataagtgtaataaatgccagaaagcttttatcctgaagaagtctctgattctccatcagagaatccatagtggagaaaaaccttataaatgcgacgaatgcggaaaaacattcgcgcagactacttatctaattgaccaccagcgccttcactcggccgaaaacccctacaagtgcaaagaatgtggcaaggtgtttatccgcagcaagagtctgctcctacaccagagggtgcacacagaaaagaagaccttcggctgcaagaagtgcggcaaaatttttagctccaaaagtaatttcatagaccataagcgtatgcactcccgcgagaagccctataaatgtaccgagtgtggtaaagctttcacccagagcgcttatcttttcgatcaccagaggctgcataatggagagaaaccatatgagtgcaatgagtgcgggaaggtcttcatactgaaaaaaagcttaatcctccatcagcgttttcacacgggagagaacctctatgagtgcaaagactgcggtaaagtgttcggatctaacaggaatcttatagaccacgaaaggcttcacaacggagaaaaaccatacgagtgcagagaatgcggaaaaaccttcatcatgagcaaaagcttcatggtgcatcaaaagctgcacacacaggagaaagcttacaaatgcgaggattgtggcaaggcttttagttacaactctagtttgctggtgcacaggagaatccataccggcgagaaaccgtttgaatgtagcgaatgcggccgcgcattttctagcaaccgaaacctcatcgagcacaagaggatacacagtggcgagaaaccctatgaatgcgatgaatgtggaaagtgcttcattttgaaaaagagcctcataggacaccaaaggatccatacaagagaaaagagctataagtgcaatgactgcgggaaggtgttcagctaccggagcaacctgatcgcacatcagcggatacataccggtgaaaagccttacgcatgtagtgaatgtggaaagggattcacatacaaccggaacctgattgagcatcaacgcattcacagcggagagaagacctatgaatgccatgtgtgccggaaagtgctcacctcttcccgcaatctgatggtgcatcagaggatccacaccggggagaaaccctataagtgcaatgagtgcgggaaggactttagtcagaataaaaacctagtggtgcaccagcgaatgcacactggagaaaagccatacgaatgcgacaaatgccgaaaatcatttacgtccaaaagaaatctcgtcgggcaccagcgaatccacaccggagaaaaaccttacggctgtaatgactgcagtaaggttttccgccagcgcaagaatctgactgtgcaccaaaagatacataccgatgagaaaccctgcgagtgtgatgtgtccgaaaaagagttctcgcaaacgtctaacctgcatctgcagcagaaaatccacacaatcgaagaatttagttggctgcagaatacaaacgagtctaagatcgaaatccaaaaaatttag

SEQ ID NO: 345855 - DNA, 966 bp, Artificial Sequence
  derived and/or modified sequence
atgacccgggagaacgtggcccacaacgccctgcggcaggagggcttggtgaaaggaaaggacgatacatggaagtggggcacttctttccaggggtcctcctcgagcgtgtgggaaacgtctcatttgcacttccggcaactcaggtatcatgagacctccggcccccaggaagctttgagccggcttcgggagctttgcagacgctggctccgacctgaagctcgaactaaggcccagatcttagagctgctggtgctcgaacagttcctgtctatccttccaggagagatcaggacgtgggtgcagctccaccaccctggaagcggcgaggaggcagtcgctctggtggaggagctccaaaaggaccttgacggaccagcaattcaggtgcctgttctggtgaaggatcaggatacgctgcaaaaagtggtgagtgcccccggcacaacgctgccaccagtgctgcctggtagccacatcgctgcagaaatctgcccgcatccccccaccgatttagtggcctttaacctacaggatcctcaacatgattctcctgcgccggaggccagtgcactaagccaagaggagaacccgcgcaatcagttgatggccttaatgctgctgactgcacaaccccaggagctcgttatgttcgaggaggtcagcgtgtgctttacttcagaagaatgggcttgtctgggccctatccagcgtgccctctactgggacgtcatgcttgagaactatggaaacgttacgagtctcgaatgggagaccatgaccgagaacgaggaggtgacatcaaaacctagttcctcgcagcgggctgactcccataaagggacctccaagaggcttcaaggatctgtcccacaggtgttagattttgaagaggagtgtgagtggcaggtgctggcttcacagtgggggaatgaaactgacgagcgagccgataccgtctag

SEQ ID NO: 345856 - DNA, 3090 bp, Artificial Sequence
  derived and/or modified sequence
atgaccagggagaacgtcgcacacaacgcactgaggcaagagggtttggtgaagggcaaggacgacacttggaagtggggaacttctttccaggggtctagctcaagcgtgtgggagacctcccatctgcatttccgtcagctgcgctaccacgagacctcgggaccgcaagaggcactgtccaggctccgagaactgtgccggagatggctgcgtccagaggcacggaccaaagctcagatattagagctcttggtgctggaacaattcctctctattctgccaggagagattaggacttgggtgcaactccatcatcccggttccggtgaggaggcggtggctctggttgaggaacttcaaaaagacctggacggccctgccatacaagtacctgtcctggtgaaggaccaggatacactgcagaaagttgtgagcgctcccggaacgacattacccccagtcttaccgggttcacatattgccgcagagatttgcccacatccccctaccgacctggtggccttcaacctgcaggatccgcagcacgattctcccgcaccagaggccagcgccctgtcacaagaggaaaatccgaggaatcagctgatggctctgatgctcctcacggcgcaacctcaggagcttgtgatgttcgaagaggtcagtgtctgctttacgtctgaagagtgggcttgcctggggccaatacaaagggcactctactgggatgttatgctcgagaactatgggaacgtgacaagcctggagtgggagaccatgacagaaaacgaagaagtgaccagcaaaccatcttcctcacagagagcagatagtcataaaggaaccagcaagcggctgcagggcagcgtgcctcaagtcctggatttcgaagaagaatgcgagtggcaggtcctcgccagtcagtggggaaacgagactgacgaaagagccgacacggtgaagaaggtgagcttgtgtgaaagggacaaaaaaaaacgtacacccccagagaaacaaggccagaagtggaaagaactgggcgacagcctgacttttggttctgccattagcgaaagcttaatcggtacagaaggaaagaagttttacaaatgcgacatgtgttgtaaacactttaataaaatttctcatctgataaatcatcggaggatccataccggcgaaaaaccacacaagtgtaaagaatgcgggaaaggcttcatccaacggtccagtctcttgatgcacctgcgcaaccatagcggagaaaaaccctataagtgtaacgagtgtggcaaggctttttctcagagcgcctacctgctgaatcatcaacggatacacaccggggagaagccttacaaatgtaaggaatgtggtaaagggttttacagacactcgggcctgataatccatttacgtaggcacagtggagagcggccatacaaatgcaacgagtgtggcaaggtttttagccagaatgcctaccttattgatcaccagcgtctgcacaaaggcgaagagccatacaagtgtaacaagtgccagaaggcattcattctgaagaagagtttaatcttgcaccaacgcatccacagtggggagaaaccgtacaaatgtgacgagtgcgggaagacctttgcccagacaacctatctgatcgatcaccaaagactacatagtgcggagaatccatacaaatgtaaggagtgtggcaaggttttcattcgttctaagtctctgttactccatcagagggtacacacagagaaaaagacctttgggtgtaagaagtgcgggaaaatctttagcagcaagagtaatttcatcgatcataagcgcatgcactcaagagagaagccatacaagtgtactgagtgcggcaaggccttcacccagtctgcgtacctgtttgaccaccaacggttacataacggggagaagccctatgaatgtaacgaatgcggcaaagtgttcatcctgaagaagtccctgatccttcatcagaggttccatactggggagaatttgtacgaatgtaaggactgtggcaaagtgtttggaagtaaccgcaatctgatcgaccacgagagattgcacaacggcgagaaaccatacgagtgtagggaatgtggaaagacatttatcatgagtaaaagctttatggtccatcagaagcttcacacacaggaaaaggcctacaagtgtgaagactgtggaaaagccttctcctacaacagctccctgctggtccaccgccgtatccataccggtgagaaacctttcgaatgcagtgagtgcggcagggccttctcaagtaacagaaacctgatcgagcacaaacgcatccatagcggtgagaaaccatacgaatgtgacgagtgtggtaaatgcttcatcctgaaaaaatccctcatcggacaccaacggattcatacccgcgagaaaagctacaagtgcaatgactgcggcaaggtctttagttatcgttccaacctaattgcccatcagcggatccacaccggggagaaaccgtacgcttgctctgaatgcggcaaaggattcacctataaccgcaacttgatcgagcaccagcggatccactctggtgaaaagacgtatgaatgtcatgtctgcagaaaggtgcttacatcttcacgaaacctcatggtgcatcaacgtatacacacaggagaaaagccctataaatgcaacgagtgtggaaaggattttagccagaacaagaacctcgtggttcaccagcggatgcacaccggcgagaaaccttatgagtgcgacaagtgtcgaaaatcttttacctctaaaagaaatcttgtgggccaccagagaattcacaccggggaaaaaccatacgggtgcaacgactgctctaaggtttttcgacagcgcaagaacctcacggtgcaccagaagattcacaccgacgagaaaccatgcgaatgcgatgtgtcagaaaaagaattctcacaaacatctaatctgcatctgcagcaaaagattcacactattgaggaattcagctggttgcagaatacaaacgaatctaaaatcgagatacagaaaatatag

SEQ ID NO: 345857 - DNA, 3090 bp, Artificial Sequence
  derived and/or modified sequence
atgacaagagagaacgttgcccacaatgcattgcgccaggaaggactggttaaagggaaggacgatacatggaaatggggcactagctttcagggcagctctagttcggtgtgggagaccagtcacttgcacttccgtcaacttagatatcacgagactagtggccctcaagaggccctcagtaggctccgcgaactttgcagaaggtggctgaggcccgaggcaaggactaaggcccagatactggaattgttggtcctcgagcagtttctatcgatcctgccgggtgagatccgaacgtgggttcagcttcaccacccagggtcaggtgaggaagcggttgcactcgtggaggaactccagaaggacctggacggccctgccatccaggtgcccgttctggtgaaagatcaggatacactccaaaaggtcgtttctgcaccaggcactaccctgcctccagtgcttccaggttctcatattgccgctgaaatctgtccacatccccctacagacctggtggccttcaatttgcaagatccacaacacgattctcctgccccagaggcttccgcccttagccaggaagagaatccacgcaaccagctgatggccctcatgctcctgactgctcaaccccaggagctggtcatgttcgaggaggtgtccgtgtgctttacttctgaggagtgggcatgtctgggacctattcagcgcgctctttattgggacgtgatgctcgaaaattacggtaatgtcacatccctggaatgggaaaccatgacggagaacgaagaggtgaccagcaagccttcttcaagtcagcgcgctgatagtcataaaggaacctccaagcgtctccagggctcggtaccccaggtcttggattttgaagaggaatgtgagtggcaggtgctcgccagtcagtggggaaacgagactgacgaacgggctgacactgtaaaaaaagtgtctttgtgtgaaagagacaagaaaaaacgcactcctcctgaaaagcaagggcagaaatggaaggaactaggcgattcactgacatttggcagtgcaatcagcgagagcctgatcggcacagaaggcaagaagttctacaaatgcgacatgtgctgtaaacattttaataagatctctcacctgattaatcatcggagaatccacactggcgagaaaccacataaatgcaaagaatgcggcaaggggttcatccagcgatccagcctgcttatgcacctccgtaatcattcgggcgaaaagccctataagtgtaatgagtgcggaaaggcattcagtcagtctgcctacctcctgaatcatcagagaattcataccggggagaagccctacaaatgtaaagagtgcggaaaggggttctatagacacagcggcctgattattcacctgaggaggcattctggggaaaggccatacaaatgcaacgagtgcggaaaggtgttctctcaaaacgcatatctgattgaccaccagcgcctgcacaaaggagaagagccttataaatgcaataaatgccaaaaggcctttatcttgaagaagtccttgatcctccaccaaaggattcatagcggtgagaagccttacaaatgcgacgagtgcggcaaaacgttcgctcagaccacttacttgatcgaccatcaacgtctgcactcagccgaaaatccgtacaagtgcaaggagtgtgggaaggtcttcatccgaagtaagtccttgcttctgcatcagcgagtgcacaccgagaagaagacatttggttgtaagaagtgtggcaaaatcttttcatctaaatccaacttcatcgatcacaagcgtatgcactctagggagaagccttacaagtgcacggaatgcggaaaggcattcactcagagtgcctacctattcgaccaccagaggttgcataatggagaaaagccatacgagtgcaatgagtgcggaaaggttttcatcctcaagaaatcgctgatacttcaccagagattccacacaggagaaaacctgtacgaatgtaaggactgcggaaaggtgttcggcagcaaccggaacctcatcgaccatgagcgcctgcataacggcgagaagccctacgaatgtcgcgaatgtgggaaaactttcatcatgtccaaatcttttatggtgcaccagaagctccatacccaggagaaggcttacaaatgcgaggattgcggcaaggctttttcatataactcctccctccttgtgcacaggcgcatccatacaggagaaaagcccttcgagtgtagtgagtgtggtagggccttttcttctaacaggaacctgatcgagcataagcgaattcattccggagaaaagccgtatgaatgtgatgagtgtggaaagtgcttcatcctaaagaagagcctgataggacatcagaggatccatacaagggaaaagagctacaagtgtaacgactgcggcaaggtgttttcgtaccggtccaatctcattgcccaccaacggatccacacaggcgaaaaaccatacgcatgctccgagtgcggaaaagggtttacttataatagaaacctcatcgagcaccagcggatccattcaggagagaagacatatgagtgtcatgtctgccgcaaggtgttaacatcttcccggaacctgatggttcaccagaggatacacacaggcgaaaaaccatacaaatgtaatgaatgtggcaaggacttctctcaaaacaaaaacctggtcgttcaccagaggatgcacaccggggaaaaaccgtacgagtgcgacaagtgcaggaagagtttcacgtcaaagagaaacttggttggtcatcaaagaattcacacaggtgaaaagccttatggatgcaacgactgcagtaaggtgttccgccagcgtaaaaatctgaccgtgcatcagaaaatccacaccgatgagaaaccctgtgagtgtgatgtgtctgagaaggaattttcccagacctcaaatctacaccttcaacagaaaatccatactatcgaggagttttcctggctgcagaatacaaatgaatccaagatcgagattcagaaaatctag

SEQ ID NO: 345858 - DNA, 966 bp, Artificial Sequence
  derived and/or modified sequence
atgacccgcgagaatgttgcccataatgcactgaggcaagagggcctggttaaagggaaggacgacacctggaaatggggtacctctttccaggggtcatcttcctctgtttgggagacctcccacttgcatttccggcaactccgatatcacgagacttctggccctcaggaggccctgagccgcttgcgagagttatgtcggagatggctgaggcccgaggcgaggaccaaagcccagatcttagagcttctagtacttgagcagttcttaagtatcctccctggcgagattagaacttgggtgcaactccatcacccagggtcaggcgaagaagcggttgccctcgtggaagagctccagaaagacttagatggcccagctattcaggttccagtactagtgaaagatcaagacaccctacagaaagtcgtgtctgccccaggcacaacccttccacccgtcctgccaggatcccatatcgccgcagagatctgccctcatcctcccaccgaccttgtggccttcaacctccaggacccacaacacgactcacctgcccctgaggccagtgcattgtcacaggaggaaaacccaagaaatcaattgatggcattgatgctcctcactgcccagccccaagagctggtgatgtttgaggaggtctccgtgtgcttcacgtccgaggaatgggcgtgtctcggcccaatccagagagctctctactgggacgtgatgctggagaactatggtaacgtcacatccctcgagtgggaaaccatgaccgagaacgaggaagtcacaagtaagccatcatcatcccaaagggccgattcccacaaagggacgtcaaagcgcctgcagggctctgttccacaagtgttggactttgaggaagaatgcgaatggcaggtgcttgcctctcagtggggcaacgaaactgacgagagagcagacacagtctag

SEQ ID NO: 345859 - DNA, 3275 bp, Artificial Sequence
  derived and/or modified sequence
attctgtgcctcggctgccggaagggctcgttcctgtgtcatctcctagcggcctggcgccgaggcggcggtacgcaaggctggagccgcagcgggagcccccgatgatactctccaagctgtaaggaagaagtcaaggattaaggagacctggactggagaggagcctttttcaaaaaacaacaatgacaagagaaaatgtagcccacaatgctctgagacaagagggccttgtgaaggggaaggatgatacctggaaatggggaaccagcttccaaggaagtagctcctctgtttgggagacctcccacctacactttagacaattacgttaccatgagacatctggaccccaggaagccctgagccggctcagggaactctgtcgccggtggctgagaccagaagcacgcaccaaggcacagatcctggagctgctggtgctggagcagtttctgagcatcctgcctggggagattcggacctgggtacagctccatcaccctggaagtggcgaggaggctgtggccctggtagaggagctgcagaaagaccttgatggaccagcaatacaagttccagtccttgtcaaggatcaggacactctccagaaggtggtgagtgccccaggaacaacacttcctcctgtacttcctggcagccacatagcagctgaaatttgcccgcatcctcctactgacctagtggcattcaacctccaggatcctcagcatgattctcctgcccctgaagcttctgccctttcccaggaagagaacccaagaaatcaattaatggcacttatgctcctaacagcccagccccaggagttggtgatgttcgaggaggtgtcagtatgcttcacttcagaggaatgggcatgtctgggcccaatccagagggccttgtactgggatgtgatgctggagaattatggaaatgtgacctccctagaatgggagaccatgaccgagaatgaggaggtgacatcaaagccaagtagttctcaaagagcagactctcataaaggaacatcaaaaagacttcaaggaagtgttccccaggtccttgattttgaagaagagtgtgaatggcaagttttggcaagtcagtggggaaatgaaacagatgaaagggcagatacagtgaagaaagtttccctttgtgaacgagacaagaagaaaaggactccaccagagaaacaaggccaaaagtggaaggaattaggagacagcttgactttcggttcagctatttctgaaagtttaataggtactgaaggaaagaagttttataaatgtgatatgtgttgtaaacattttaataaaatctcccatcttataaaccatcggagaatccacactggtgagaaacctcataaatgtaaggaatgtggaaaaggctttattcagcgttcgagccttctaatgcatttacggaaccattcaggggagaaaccttataaatgtaatgaatgtgggaaagcattttctcaaagtgcttaccttctaaaccatcagaggatccacactggggagaaaccttataagtgtaaggagtgtggaaagggcttctataggcactcaggcctaattatacatctaaggcgccattcaggggagagaccttataagtgtaatgaatgtgggaaagtcttctctcagaatgcttacctcattgaccatcagaggctccacaaaggggaagaaccttataaatgtaataagtgtcagaaagctttcattctgaagaagagcctcattctgcaccagagaatccactctggggaaaaaccctataaatgtgatgaatgtggaaagacctttgctcagaccacttatcttattgaccatcagcgactccacagtgcagagaacccttacaagtgtaaagaatgtggaaaagttttcattcgaagcaaaagcctcctcttacatcagagagtccacacagaaaagaaaacctttggttgtaaaaagtgtgggaagattttcagttctaagtcaaacttcattgaccataagaggatgcacagcagagagaaaccttacaaatgcactgaatgtgggaaagcctttactcaaagtgcttacctttttgaccaccagagactccacaatggggagaagccctatgaatgtaatgaatgtgggaaagtttttattctgaagaagagcctcattttacatcaaaggttccacactggagagaatctctatgaatgtaaagattgtggtaaggtcttcggttcaaacagaaacctcattgaccatgagagactccacaatggggagaagccatatgaatgtcgagagtgtgggaaaacctttattatgagcaaaagttttatggtccatcagaaactccatacacaagagaaagcctacaaatgtgaggattgtgggaaggctttcagttacaattcaagcctgcttgtacatcggagaatccacaccggagaaaaaccctttgaatgcagtgagtgtggaagagctttcagttcaaacagaaacctcattgagcataagagaatccacagtggtgagaaaccctatgagtgtgatgagtgtggcaaatgcttcattctgaagaaaagcctcattggacatcagagaattcacacgagggaaaaatcttataaatgcaatgactgtgggaaggtcttcagttaccgctcaaaccttatagcccatcagaggatccatactggtgagaagccctatgcgtgtagtgagtgtggaaaaggttttacgtacaacagaaacctgattgaacatcaaagaattcacagtggagaaaaaacctacgaatgtcatgtatgtaggaaagtccttacctctagtagaaatcttatggtacatcaaagaatccatactggagagaaaccttataaatgtaatgagtgtggaaaagactttagtcagaataaaaaccttgttgtacatcagagaatgcacactggggaaaaaccttatgagtgtgacaagtgtaggaaatcctttacttctaagaggaatttagttggccaccagagaattcacacaggggagaaaccctatgggtgtaatgattgtagtaaagtttttaggcaaagaaaaaaccttactgtacatcagaaaatccacacagatgaaaaaccttgtgaatgtgatgtgtctgaaaaagaattctctcagacttccaaccttcatcttcaacagaaaatccataccattgaggaattctcttggctacaaaacaccaatgagtccaagattgagattcagaaaatctag

SEQ ID NO: 345860 - DNA, 4299 bp, Artificial Sequence
  derived and/or modified sequence
ggagctgactgggagctgactggggcctggaaagctcagttgtttctctgggctaactttaacaatgatttcttgaggtcttgtagatgatactctccaagctgtaaggaagaagtcaaggattaaggagacctggactggagaggagcctttttcaaaaaacaacaatgacaagagaaaatgtagcccacaatgctctgagacaagagggccttgtgaaggggaaggatgatacctggaaatggggaaccagcttccaaggaagtagctcctctgtttgggagacctcccacctacactttagacaattacgttaccatgagacatctggaccccaggaagccctgagccggctcagggaactctgtcgccggtggctgagaccagaagcacgcaccaaggcacagatcctggagctgctggtgctggagcagtttctgagcatcctgcctggggagattcggacctgggtacagctccatcaccctggaagtggcgaggaggctgtggccctggtagaggagctgcagaaagaccttgatggaccagcaatacaagttccagtccttgtcaaggatcaggacactctccagaaggtggtgagtgccccaggaacaacacttcctcctgtacttcctggcagccacatagcagctgaaatttgcccgcatcctcctactgacctagtggcattcaacctccaggatcctcagcatgattctcctgcccctgaagcttctgccctttcccaggaagagaacccaagaaatcaattaatggcacttatgctcctaacagcccagccccaggagttggtgatgttcgaggaggtgtcagtatgcttcacttcagaggaatgggcatgtctgggcccaatccagagggccttgtactgggatgtgatgctggagaattatggaaatgtgacctccctagaatgggagaccatgaccgagaatgaggaggtgacatcaaagccaagtagttctcaaagagcagactctcataaaggaacatcaaaaagacttcaaggaagtgttccccaggtccttgattttgaagaagagtgtgaatggcaagttttggcaagtcagtggggaaatgaaacagatgaaagggcagatacagtgaagaaagtttccctttgtgaacgagacaagaagaaaaggactccaccagagaaacaaggccaaaagtggaaggaattaggagacagcttgactttcggttcagctatttctgaaagtttaataggtactgaaggaaagaagttttataaatgtgatatgtgttgtaaacattttaataaaatctcccatcttataaaccatcggagaatccacactggtgagaaacctcataaatgtaaggaatgtggaaaaggctttattcagcgttcgagccttctaatgcatttacggaaccattcaggggagaaaccttataaatgtaatgaatgtgggaaagcattttctcaaagtgcttaccttctaaaccatcagaggatccacactggggagaaaccttataagtgtaaggagtgtggaaagggcttctataggcactcaggcctaattatacatctaaggcgccattcaggggagagaccttataagtgtaatgaatgtgggaaagtcttctctcagaatgcttacctcattgaccatcagaggctccacaaaggggaagaaccttataaatgtaataagtgtcagaaagctttcattctgaagaagagcctcattctgcaccagagaatccactctggggaaaaaccctataaatgtgatgaatgtggaaagacctttgctcagaccacttatcttattgaccatcagcgactccacagtgcagagaacccttacaagtgtaaagaatgtggaaaagttttcattcgaagcaaaagcctcctcttacatcagagagtccacacagaaaagaaaacctttggttgtaaaaagtgtgggaagattttcagttctaagtcaaacttcattgaccataagaggatgcacagcagagagaaaccttacaaatgcactgaatgtgggaaagcctttactcaaagtgcttacctttttgaccaccagagactccacaatggggagaagccctatgaatgtaatgaatgtgggaaagtttttattctgaagaagagcctcattttacatcaaaggttccacactggagagaatctctatgaatgtaaagattgtggtaaggtcttcggttcaaacagaaacctcattgaccatgagagactccacaatggggagaagccatatgaatgtcgagagtgtgggaaaacctttattatgagcaaaagttttatggtccatcagaaactccatacacaagagaaagcctacaaatgtgaggattgtgggaaggctttcagttacaattcaagcctgcttgtacatcggagaatccacaccggagaaaaaccctttgaatgcagtgagtgtggaagagctttcagttcaaacagaaacctcattgagcataagagaatccacagtggtgagaaaccctatgagtgtgatgagtgtggcaaatgcttcattctgaagaaaagcctcattggacatcagagaattcacacgagggaaaaatcttataaatgcaatgactgtgggaaggtcttcagttaccgctcaaaccttatagcccatcagaggatccatactggtgagaagccctatgcgtgtagtgagtgtggaaaaggttttacgtacaacagaaacctgattgaacatcaaagaattcacagtggagaaaaaacctacgaatgtcatgtatgtaggaaagtccttacctctagtagaaatcttatggtacatcaaagaatccatactggagagaaaccttataaatgtaatgagtgtggaaaagactttagtcagaataaaaaccttgttgtacatcagagaatgcacactggggaaaaaccttatgagtgtgacaagtgtaggaaatcctttacttctaagaggaatttagttggccaccagagaattcacacaggggagaaaccctatgggtgtaatgattgtagtaaagtttttaggcaaagaaaaaaccttactgtacatcagaaaatccacacagatgaaaaaccttgtgaatgtgatgtgtctgaaaaagaattctctcagacttccaaccttcatcttcaacagaaaatccataccattgaggaattctcttggctacaaaacaccaatgagtccaagattgagattcagaaaatctagtgtcatatgtaaaatggaatagaatccctgcctacttaagtaactgttggacaaatgatatatatttcttctaaggaaaaagtttattatttactctttactagacaaatgagtagcatatagaagaaagttaataggccgggcttggtggctcatgcctgtaatcccagcactttgagaggccgaagcgagtggatcacctgaggtcaggattttgagaccagcctgaccaacatggtgaaaccccatctctactaaaatacaaaaattatccgggcatgggggcacacaccggtaatcccagctactcaggaggctgagacaggagagtcgcttgaacctgggagggcggaggttgcagtgagccaggatcgcgccattgcactccagcctgggcaacaagagcgaaactcttgtctgaaaaaataaagttcatcccaactttcaagtctacaaaaacataatccaaatctaataacatagttgtaaatgagagcaacaataaaaagtagacatgggctgggtgcagtggctcactcctgtagtcccaggactttgggaggccgaggtgggaagatcccttgagcccaggagttcgagacaagcctgggtaacacggggagacccgtctttagtaaataaaaataaatttattaataaaactaaaaatttaataataaaaagtggacattgttttttaaaatgtgtatagtatgcattttaaagatagtgtcactgctgtggaaaacctgaacagacagtatgatccagaatgtcaggtgtggagttgggcggacaagagtctgctgatgaggacaacctaaaagagcactggatttggaatcagaagacctacctttgattcctggctttcccttaatggccatgtgatgttattaagtcagcctctaaagctttagtttcctgtcagtcaaatgttgacatgatacctacctcacagggttgttgtgagggttaagtgaaaggatctttgtgaaagtactttttgaaatcattcagttgtcaataaagttggataaaa

SEQ ID NO: 345861 - DNA, 1253 bp, Artificial Sequence
  derived and/or modified sequence
agtattctcggctcggccattattctgtgcctcggctgccggaagggctcgttcctgtgtcatctcctagcggcctggcgccgaggcggcggtacgcaaggctggagccgcagcgggagcccccggtcttgtagatgatactctccaagctgtaaggaagaagtcaaggattaaggagacctggactggagaggagcctttttcaaaaaacaacaatgacaagagaaaatgtagcccacaatgctctgagacaagagggccttgtgaaggggaaggatgatacctggaaatggggaaccagcttccaaggaagtagctcctctgtttgggagacctcccacctacactttagacaattacgttaccatgagacatctggaccccaggaagccctgagccggctcagggaactctgtcgccggtggctgagaccagaagcacgcaccaaggcacagatcctggagctgctggtgctggagcagtttctgagcatcctgcctggggagattcggacctgggtacagctccatcaccctggaagtggcgaggaggctgtggccctggtagaggagctgcagaaagaccttgatggaccagcaatacaagttccagtccttgtcaaggatcaggacactctccagaaggtggtgagtgccccaggaacaacacttcctcctgtacttcctggcagccacatagcagctgaaatttgcccgcatcctcctactgacctagtggcattcaacctccaggatcctcagcatgattctcctgcccctgaagcttctgccctttcccaggaagagaacccaagaaatcaattaatggcacttatgctcctaacagcccagccccaggagttggtgatgttcgaggaggtgtcagtatgcttcacttcagaggaatgggcatgtctgggcccaatccagagggccttgtactgggatgtgatgctggagaattatggaaatgtgacctccctagaatgggagaccatgaccgagaatgaggaggtgacatcaaagccaagtagttctcaaagagcagactctcataaaggaacatcaaaaagacttcaaggaagtgttccccaggtccttgattttgaagaagagtgtgaatggcaagttttggcaagtcagtggggaaatgaaacagatgaaagggcagatacagtgaagaaagtttccctttgtgaacgagacaagaagggactccaccagagaaacaaggccaaaagtggaaggaattag

SEQ ID NO: 345862 - protein, 276 aa, Artificial Sequence
  derived and/or modified sequence
MTTAGRGNLGLIPRSTAFQKQEGRLTVKQEPANQTWGQGSSLQKNYPPVCEIFRLHFRQLCYHEMSGPQEALSRLRELCRWWLMPEVHTKEQILELLVLEQFLSILPGELRTWVQLHHPESGEEAVAVVEDFQRHLSGSEEVSAPAQKQEMHFEETTALGTTKESPPTSPLSGGSAPGAHLEPPYDPGTHHLPSGDFAQCTSPVPTLPQVGNSGDQAGATVLRMVRPQDTVAYEDLSVDYTQKKWKSLTLSQRALQWNMMPENHHSMASLGWSTMA

SEQ ID NO: 345863 - DNA, 612 bp, Artificial Sequence
  derived and/or modified sequence
agcaagtgcctgatcagacaccagagcctgcacaccggcgagaagccctacaagtgcagcgagtgcggcaaggccttcaaccagaacagccagctgatcgagcacgagagaatccacaccggcgagaagcccttcgagtgcagcgagtgcggcaaggccttcggcctgagcaagtgcctgatcagacaccagagactgcacaccggcgagaagccctacaagtgcaacgagtgcggcaagagcttcaaccagaacagccacctgatcatccaccagagaatccacaccggcgagaagccctacgagtgcaacgagtgcggcaaggtgttcagctacagcagcagcctgatggtgcaccagagaacccacaccggcgagaagccctacaagtgcaacgactgcggcaaggccttcagcgacagcagccagctgatcgtgcaccagagagtgcacaccggcgagaagccctacgagtgcagcgagtgcggcaaggccttcagccagagaagcaccttcaaccaccaccagagaacccacaccggcgaggtgctgagaagcggcctggtgagcttcctgagatacggcagcgagaccgagagcaacgacctgtag

SEQ ID NO: 345864 - DNA, 612 bp, Artificial Sequence
  derived and/or modified sequence
tctaaatgtttaataaggcaccagtcccttcacaccggggaaaagccttacaagtgcagcgagtgtggcaaagcctttaatcagaattcacagctcattgaacacgagcgtatccatacgggcgagaaaccatttgagtgctccgaatgcggaaaggcctttggcctcagtaagtgtctgattcgacatcagcggctccatacaggagagaagccatacaagtgcaacgagtgcgggaaatcatttaatcagaacagccacctgatcatccaccaacgaattcacacaggcgaaaagccgtatgagtgcaacgagtgcggaaaagtgttcagctatagcagttcgctaatggtgcatcagcgtacacataccggcgagaagccatacaaatgtaacgattgtggcaaggccttttccgattctagtcagttgatcgtgcaccaacgcgtgcacactggcgagaaaccatatgagtgcagtgagtgcggtaaagccttttctcagagatctaccttcaatcaccaccagaggactcatactggcgaagttctgaggtccggattagtgtcctttcttcgctatgggtctgagacagaaagcaacgacctgtag

SEQ ID NO: 345865 - DNA, 612 bp, Artificial Sequence
  derived and/or modified sequence
agcaagtgcctgatccgccaccagagcctgcacactggagagaagccctacaagtgcagtgaatgtgggaaggccttcaaccagaacagccagctgattgaacatgagcgcatccacactggagagaagccctttgagtgcagtgaatgtgggaaggccttcggcctgagcaagtgcctgatccgccaccagaggctgcacactggagagaagccctacaagtgcaatgaatgtgggaagagcttcaaccagaacagccacctgatcatccaccagaggatccacactggagagaagccctatgagtgcaatgaatgtgggaaggtgttctcctacagcagcagcctgatggtgcaccagaggacccacactggagagaagccctacaagtgcaatgactgtgggaaggccttcagtgacagcagccagctgattgtgcaccagagggtgcacactggagagaagccctatgagtgcagtgaatgtgggaaggccttcagccagaggagcaccttcaaccaccaccagaggacccacactggagaggtgctgcggagcggcctggtgtccttcctgcgctatggcagcgagacagagagcaatgacctgtag

SEQ ID NO: 345866 - DNA, 612 bp, Artificial Sequence
  derived and/or modified sequence
agcaagtgcctgatccggcaccagagcctgcacaccggcgagaagccgtacaagtgtagcgaatgtggaaaggcttttaatcaaaactctcagctaatagaacacgagcgtatacacaccggcgagaagccatttgagtgctcagaatgcggcaaggcctttggactgagtaagtgcctcatacggcaccaaaggttgcacaccggggagaagccgtataaatgcaatgaatgtgggaagtcatttaaccagaactcccatctgattatccaccagagaattcatacgggcgagaagccgtacgagtgcaatgagtgcggtaaggtgttcagttactctagctcactgatggtgcaccaacgcactcataccggtgagaagccatacaagtgtaatgattgtgggaaggcctttagtgatagctcacagttaatcgtccatcagcgcgtgcacaccggcgagaagccctacgagtgctcagagtgcggaaaagccttctcgcaaagaagcaccttcaatcaccatcagaggactcacacaggcgaagtcttgcgtagtggcctcgtgtcctttttgaggtacggctctgaaaccgaatctaacgatttatag

SEQ ID NO: 345867 - DNA, 612 bp, Artificial Sequence
  derived and/or modified sequence
tcgaagtgccttatcaggcatcaatcactgcataccggggagaagccgtataagtgttctgaatgtggcaaggcgtttaatcagaacagccagctgatcgaacatgagcgaattcacaccggagagaagcctttcgagtgctctgagtgtggaaaggccttcgggctgagcaagtgcctgatccggcatcagagactgcataccggcgaaaagccttacaaatgtaatgaatgtggaaagagcttcaatcagaactcccatctcatcatccaccagcgaattcacacgggagaaaaaccatacgaatgtaatgaatgtggtaaagtattctcatactcttcgagtctgatggtgcaccagcgaacccacaccggagagaaaccctataagtgcaacgactgcggcaaggctttctctgactcttctcagctgattgttcaccagcgcgtccacactggcgaaaagccttacgaatgttcagagtgcgggaaggcatttagccagcgatcgacgttcaatcatcaccaaaggacccatacaggcgaagtacttcggtctggtctggtgagcttcctgcgctatggttcagagacggagagcaatgacttatag

SEQ ID NO: 345868 - DNA, 612 bp, Artificial Sequence
  derived and/or modified sequence
agtaaatgtcttattcgacatcagagcctccatactggggaaaagccatacaaatgtagtgaatgtgggaaagccttcaatcagaactctcaactcattgagcatgagcgaattcatactggagaaaaaccttttgaatgtagcgagtgtggtaaggcatttggtctgagtaaatgtcttattcggcaccagagacttcacacgggtgaaaagccctataaatgcaatgagtgtggaaaatccttcaatcaaaactcacaccttattatacaccagagaattcacactggtgagaaaccctatgaatgtaatgagtgtgggaaggtattcagttatagctccagccttatggtacatcagagaacccatactggggaaaaaccctataaatgcaatgattgtgggaaagcttttagtgacagctcacagcttattgtacaccagagagtccacaccggagagaaaccttatgaatgtagtgaatgtgggaaagcctttagtcagcgttccacttttaatcaccaccagcgaactcacactggagaggtcctcaggtctggcttggtcagtttcttaaggtatggttctgagacagagagcaacgacctttga

SEQ ID NO: 345869 - DNA, 447 bp, Artificial Sequence
  derived and/or modified sequence
atggactgcgtgccccccatccagtgcagctgcagcatgggcggcagataccaccaccccgccggcgaggccttctggaccggcgagagatgcgagcagttctgccactgccaggccagcacccacgccgtgtgctgcagccccagcagctgcggccccggccagagatgcgagaccctgagaggcatcttcggctgccaccccctgagccccggcatctaccaggccaccatgcacagccacgtggccagcttcgacagaaagagcgtggagttccccggcacctgcgccagcgccttcaccaagagctgcggcagcagcagcagcctgagactgttcaaggtggagatcggcaaggagaagcaggtgcagcagagccactgcgtgcacttcaaggacgtgggcagctgggaccccggcctgagcgccgagagagcccccacctag

SEQ ID NO: 345870 - DNA, 447 bp, Artificial Sequence
  derived and/or modified sequence
atggattgtgtccctccgatccagtgtagttgctccatgggagggcgctaccaccatccagccggcgaggctttctggacaggggagcggtgtgaacagttttgccattgtcaagcgagtacccatgcggtgtgttgtagcccatccagctgtggacccggccagcgctgcgagactcttagaggcatctttggttgccatccactaagtcctggcatctatcaagcgacaatgcacagccacgtggcaagtttcgataggaaaagcgtcgaattccctggcacctgcgcctctgcttttactaagagctgtgggtcttcctcctctctgcgactgttcaaggtggagatcggcaaggagaaacaggtgcagcaatcccactgcgtccactttaaagacgtggggtcctgggatccaggccttagcgcagagcgcgctcctacgtag

SEQ ID NO: 345871 - DNA, 153 bp, Artificial Sequence
  derived and/or modified sequence
atggacatcctgctggacctgggctggcacttcagcaactgtgatgaggacaccttctacagccctgtgcagaacacagaaggagacctgctcttctttgaccacaacctgaagacagaccggggccacgtggagaggtctgtgatggactag

SEQ ID NO: 345872 - DNA, 447 bp, Artificial Sequence
  derived and/or modified sequence
atggactgtgtgccccccatccagtgcagctgcagcatgggcggccgctaccaccaccctgctggggaggccttctggacaggagagcgctgtgagcagttctgccactgccaggccagcacccatgctgtgtgctgcagccccagcagctgtggccctggccagagatgtgagaccctgcggggcatcttcggctgccaccccctgagccctggcatctaccaggccaccatgcacagccacgtggccagctttgacaggaagtctgtggagttccctggcacctgtgccagcgccttcaccaagagctgtggcagcagcagcagcctgcggctcttcaaggtggagatcggcaaggagaagcaggtgcagcagagccactgtgtgcacttcaaggatgtgggctcctgggaccccggcctgtctgctgagcgggcccccacctag

SEQ ID NO: 345873 - DNA, 447 bp, Artificial Sequence
  derived and/or modified sequence
atggactgcgtgccccccatccagtgcagctgcagcatgggcggcagataccaccatcccgctggggaggccttttggaccggagagagatgtgagcaattctgccattgccaggcatccacccacgcggtctgctgctcaccctctagctgcgggcccggacagcgctgcgagaccctgaggggtatcttcgggtgtcacccactctccccgggtatctatcaggccactatgcactcacatgtggcctcatttgaccgcaagtctgttgagttccctggcacttgcgctagcgcttttactaagagctgcgggtcatcttcctccctgcgactcttcaaggttgagatcgggaaagagaaacaggtccaacagtcacattgtgtacactttaaggacgtgggctcttgggatccgggcctctcagccgagagagccccaacttag

SEQ ID NO: 345874 - DNA, 447 bp, Artificial Sequence
  derived and/or modified sequence
atggattgtgtgccaccaatccagtgcagctgttcaatggggggtcgctaccatcaccccgctggagaagctttttggacgggcgaaaggtgtgagcagttctgtcactgtcaggcatccacgcacgctgtgtgctgctccccttctagctgcggccctggccagcggtgcgaaacattgagaggtattttcggctgccatcctctgtccccaggaatttatcaggctactatgcactcacacgtcgcctcctttgataggaaaagcgtcgaattcccaggtacatgcgctagcgctttcactaagtcttgtgggtctagctcctctctgaggttgtttaaggtggaaattgggaaagagaaacaggtccagcagagccactgtgtccattttaaagacgtgggtagctgggatccgggactgtccgccgagcgggcacctacttag

SEQ ID NO: 345875 - DNA, 1269 bp, Artificial Sequence
  derived and/or modified sequence
ccgccgtgaccacgccgccaccgttatcaccgccgtgaccacgccgccaccgttatcaccgccgtgaccacgccgccaccgttatcaccgccgtgaccacgccgccaccattatgctacatcctgatgatgcctccacctcccctcctttgcctttatgacttacccttggcccccacaaccctctctccgctcccttggtcctattctggttggaaatgctccagaatagtaatgcttgctcaattatttaactcctacctgttttcttccagagctggcctgtcctccccgcagcaattacgagctctgcggctcctcctgtcctagctcttgtgccgagcctgccctgcccgacagctgcctgacaccatgccaggatggctgccagtgtgacccaggctttgtgctcagtggcatggactgcgtgcccccaatccagtgcagctgctccatggggggcaggtaccaccacccggctggggaggccttctggactggggagcgctgtgagcaattctgccactgccaggcctccacccacgccgtgtgctgctccccgtcctcctgtgggccggggcagagatgtgagaccctcaggggcatctttgggtgccacccactctcccctggcatttatcaagcaaccatgcactcacacgtcgcctcctttgaccggaagagtgttgagtttccaggcacttgcgcttctgcttttaccaagtcctgtggctcctccagctcattgcgccttttcaaggtggaaattgggaaggagaaacaagtccagcagtcccattgtgttcatttcaaagatgtaggttcatgggacccaggtttgtctgcagagagagccccgacctgatgaggtaagcactcattggcatctagagactcttgaaccgattgaagctaaaagaaatacattggctcaaactaagtaaaaatcatgtgatagcctagtgaaagtgtagagattctgggtccacagaagttccctatataccactttggctgttttggttacagaaagcctcataaaaggtaactcaaaccagtcacagactgtgttttatgatttttagactaattacataactgaaaattccagagggagatcaggcatggtttgatcagggtgctaactcagtttttcagcatttctcttggtctgtgtttctctatagcattagctttgtcctcaggctggcttttcttgtgatggcaaaataactgccaattttccagtcattaaatgtgtattccccat

SEQ ID NO: 345876 - protein, 222 aa, Artificial Sequence [sequence omitted]

SEQ ID NO: 345877 - DNA, 669 bp, Artificial Sequence
  derived and/or modified sequence
atggtcccctgctggaaccatggtaatataaccagaagcaaggctgaggagctgctctccagaaccggcaaagatgggagttttctggtgcgagcctcagagtctatctctagggcatacgccctgtgcgttttatacagaaactgcgtttacacataccggatcttaccgaatgaagatgataagtttactgttcaggcgtcagaaggggtgtcaatgcgcttctttaccaaacttgatcagctgattgagttctataaaaaggaaaatatgggtctggtgacccacctgcagtaccccgttccgcttgaggaagaggataccggtgacgatcccgaagaggatacagtagaatctgtcgtttctccacctgagcttcctccgcgcaacattccgcttaccgcctcttcttgtgaggccaaggaggtccccttcagcaatgagaatcctcgagccacggaaactagccggcccagcttgtcggagactctctttcaacgcctgcaatcgatggacacatctggactgcctgaggagcatctcaaagctattcaggactatctgtccacgcagctcgctcaggacagcgagttcgtcaagaccgggtcaagctccttgccgcatctgaagaagctgacaactctcctttgcaaagagctgtacgggtag

SEQ ID NO: 345878 - DNA, 792 bp, Artificial Sequence
  derived and/or modified sequence
gtggcagcagccgaggccaccaagaggcaacgggcggcaggttgcagtggaggggcctccgctcccctcggtggtgtgtgggtcctgggggtgcctgccggcccggccgaggaggcccacgcccaccatggtcccctgctggaaccatggcaacatcacccgctccaaggcggaggagctgctttccaggacaggcaaggacgggagcttcctcgtgcgtgccagcgagtccatctcccgggcatacgcgctctgcgtgctgtatcggaattgcgtttacacttacagaattctgcccaatgaagatgataaattcactgttcaggcatccgaaggcgtctccatgaggttcttcaccaagctggaccagctcatcgagttttacaagaaggaaaacatggggctggtgacccatctgcaataccctgtgccgctggaggaagaggacacaggcgacgaccctgaggaggacacagtagaaagtgtcgtgtctccacccgagctgcccccaagaaacatcccgctgactgccagctcctgtgaggccaaggaggttcctttttcaaacgagaatccccgagcgaccgagaccagccggccgagcctctccgagacattgttccagcgactgcaaagcatggacaccagtgggcttccagaagagcatcttaaggccatccaagattatttaagcactcagctcgcccaggactctgaatttgtgaagacagggtccagcagtcttcctcacctgaagaaactgaccacactgctctgcaaggagctctatgg

SEQ ID NO: 345879 - DNA, 669 bp, Artificial Sequence
  derived and/or modified sequence
atggtgccctgctggaaccacggcaacatcaccaggagcaaggccgaggagctgctgagcaggacaggcaaggatggcagcttcctggtgcgggccagcgagagcatcagccgggcctatgccctgtgtgtgctgtacagaaactgtgtgtacacctaccgcatcctgcccaatgaagatgacaagttcaccgtgcaggccagcgagggcgtgtccatgaggttcttcaccaagctggaccagctgattgagttctacaagaaggagaacatgggcctggtgacccacctgcagtaccctgtgcccctggaggaggaggacacaggagatgatcctgaggaggacacagtggagagcgtggtgtccccacctgagctgcccccaagaaacatccccctgacagccagcagctgtgaggccaaggaggtgcccttcagcaatgaaaacccccgggccacagagaccagccggcccagcctgtctgagaccctcttccagaggctgcagagcatggacaccagcggcctgcctgaggagcacctgaaggccatccaggactacctgagcacccagctggcccaggacagcgagtttgtgaagacaggcagcagcagcctgccccacctgaagaagctgaccaccctgctgtgcaaggagctgtatggatag

SEQ ID NO: 345880 - DNA, 669 bp, Artificial Sequence
  derived and/or modified sequence
atggtgccctgctggaaccacggcaacatcacccggagcaaggccgaggagctattgtctcgcacagggaaagatggctcctttttagtaagagcctccgagtctatcagccgtgcgtatgccttatgcgtactatacagaaattgcgtatatacttatcggatacttcctaacgaagacgataagttcacggtacaggcctcagagggggtgtctatgcgcttttttaccaagctggaccaactgatcgagttttataagaaggagaatatggggctggtcactcacctgcagtacccggttccactggaagaggaggatacgggcgacgaccccgaagaagacacagtcgaatctgtggtttctccacccgaactgccaccgcgaaatatccccttaacagcatctagttgtgaggccaaagaagtgccattttctaacgaaaacccgcgcgccaccgaaacatctagaccttctctctcagaaacgcttttccagcgtttacagagtatggacacttctgggctaccggaggaacatctgaaagctatccaagactacctatctacccaactcgcccaggattctgagtttgtaaagaccggatcctcatcattgcctcacctcaaaaaactgaccaccctgctttgtaaggaactgtatggatag

SEQ ID NO: 345881 - DNA, 669 bp, Artificial Sequence
  derived and/or modified sequence
atggtaccctgctggaatcacgggaacattacaagaagcaaggccgaagagcttctgtcccgaactgggaaggacggtagctttctggtgagagcaagtgaatctataagccgcgcatatgctctttgtgttctgtatagaaattgtgtgtacacataccgcatcctaccgaacgaggatgacaagtttacagtgcaggcttcggagggagtgagcatgagatttttcactaagctcgatcagctaattgagttttacaagaaggaaaatatgggattggtgacccacctccagtaccctgtccccttggaagaggaagatacaggagatgatccagaggaagatacagtggagagcgtcgtctctccgcctgagctgccgcctcgcaacatacctctgacagcttcatcctgcgaggctaaagaggtcccattcagcaatgaaaatccccgagccaccgagacatcgcgcccatccctaagtgagacactattccagagattgcagagcatggacacttctgggctgcctgaagaacacctcaaggcaatccaggattacctgagcacccagttggcgcaagattctgaatttgtcaaaaccggctcctcaagtctccctcatctgaaaaagctgacaaccctcctgtgtaaagaactctatggatag

SEQ ID NO: 345882 - DNA, 669 bp, Artificial Sequence
  derived and/or modified sequence
atggtgccctgctggaaccacggcaacatcaccagaagcaaggccgaggagctgctgagcagaaccggcaaggacggcagcttcctggtgagagccagcgagagcatcagcagagcctacgccctgtgcgtgctgtacagaaactgcgtgtacacctacagaatcctgcccaacgaggacgacaagttcaccgtgcaggccagcgagggcgtgagcatgagattcttcaccaagctggaccagctgatcgagttctacaagaaggagaacatgggcctggtgacccacctgcagtaccccgtgcccctggaggaggaggacaccggcgacgaccccgaggaggacaccgtggagagcgtggtgagcccccccgagctgccccccagaaacatccccctgaccgccagcagctgcgaggccaaggaggtgcccttcagcaacgagaaccccagagccaccgagaccagcagacccagcctgagcgagaccctgttccagagactgcagagcatggacaccagcggcctgcccgaggagcacctgaaggccatccaggactacctgagcacccagctggcccaggacagcgagttcgtgaagaccggcagcagcagcctgccccacctgaagaagctgaccaccctgctgtgcaaggagctgtacggctag

SEQ ID NO: 345883 - protein, 293 aa, Artificial Sequence
  derived and/or modified sequence
MDRRVKLWEVFGEKCEFKGSLSGSNAGITSIEFDSAGSYLLAASNDFASRIWTVDDYRLRHTLTGHSGKVLSAKFLLDNARIVSGSHDRTLKLWDLRSKVCIKTVFAGSSCNDIVCTEQCVMSGHFDKKIRFWDIRSESIVREMELLGKITALDLNPERTELLSCSRDDLLKVIDLRTNAIKQTFSAPGFKCGSDWTRVVFSPDGSYVAAGSAEGSLYIWSVLTGKVEKVLSSSTAHPSMRWRGRPLARTLSVWTKDAKLCCGHSTDGALRAGRTPVPSSEEAHGLLQPCPGR

SEQ ID NO: 345884 - protein, 624 aa, Artificial Sequence
  derived and/or modified sequence
MSSGLRAADFPRWKRHISEQLRRRDRLQRQAFEEIILQYNKLLEKSDLHSVLAQKLQAEKHDVPNRHEISPGHDGTWNDNQLQEMAQLRIKHQEELTELHKKRGELAQLVIDLNNQMQRKDREMQMNEAKIAECLQTISDLETECLDLRTKLCDLERANQTLKDEYDALQITFTALEGKLRKTTEENQELVTRWMAEKAQEANRLNAENEKDSRRRQARLQKELAEAAKEPLPVEQDDDIEVIVDETSDHTEETSPVRAISRAATKRLSQPAGGLLDSITNIFGLSESPLLGHHSSSDAARRRSVSSFPVPQDNVDTHPGSGKEVRVPATALCVFDAHDGEVNAVQFSPGSRLLATGGMDRRVKLWEVFGEKCEFKGSLSGSNAGITSIEFDSAGSYLLAASNDFASRIWTVDDYRLRHTLTGHSGKVLSAKFLLDNARIVSGSHDRTLKLWDLRSKVCIKTVFAGSSCNDIVCTEQCVMSGHFDKKIRFWDIRSESIVREMELLGKITALDLNPERTELLSCSRDDLLKVIDLRTNAIKQTFSAPGFKCGSDWTRVVFSPDGSYVAAGSAEGSLYIWSVLTGKVEKVLSKQHSSSINAVAWSPSGSHVVSVDKGCKAVLWAQY

SEQ ID NO: 345885 - DNA, 1875 bp, Artificial Sequence
  derived and/or modified sequence
atgtcgagtggcctgagggctgctgatttcccgagatggaagcggcacatctcagagcaattgcgccggagagatagactgcagagacaggcttttgaggagataattcttcagtacaacaaattactggagaagtcggatcttcacagtgtgcttgctcaaaagcttcaagctgagaagcatgatgtccctaaccggcacgagatttcaccgggccatgatggcacatggaacgacaaccaactccaagagatggcccagcttcgaatcaaacaccaggaggaattgacagagcttcacaagaaacgtggcgaactggcacagctcgtgatcgacctgaataatcaaatgcaacggaaagatcgcgaaatgcaaatgaatgaggctaagatcgccgaatgcctgcagactataagcgacctagagacggagtgcttagatctccggacgaagctttgtgaccttgagcgcgctaatcagacccttaaggacgagtatgatgcccttcagatcacatttacagccctagaaggaaagctgcgcaagaccacagaagagaaccaggagttagttaccagatggatggcagaaaaggctcaggaagctaataggttgaacgcggagaacgagaaagacagccgcagaaggcaggcacgattgcaaaaggaactcgccgaagcagcaaaggagccccttccagtggagcaggacgatgatatcgaagttatcgtagatgaaacgagcgaccacactgaggaaacctcacctgtgcgtgctattagccgggcagcgactaagagactaagccagccggcaggagggctccttgactccattaccaacatcttcggtttgtcagaatctcctcttctggggcaccactcaagttcggatgccgcccgacgtcgcagcgtgtctagcttcccggtgccacaagataatgtggatacccaccccggcagtgggaaggaagtgagggtgcccgctacagctttatgtgtgttcgatgcacacgatggcgaggtgaatgctgtgcagttttcgccgggctctaggttactcgcaaccggagggatggacaggagggttaagctgtgggaagtattcggcgaaaaatgcgagtttaaagggagcctgagtggcagcaacgccggaataacatccattgaattcgactctgcggggtcctacctgctcgctgcaagtaacgatttcgcctcccgcatctggacagtggacgattacagattacgccacactctcaccggacatagtggaaaggttctgagcgccaaattcctccttgacaacgcgaggattgtgagtggctcacatgatcggactcttaaactctgggacctgagatcaaaagtgtgcattaagaccgtgtttgctgggagctcctgcaacgacatagtgtgtacagaacagtgcgtgatgagcgggcactttgacaagaagattcgattttgggatatccggagtgagtcaatcgtgagagagatggagctattgggcaaaatcactgcactggacctaaatcccgagcgcaccgagctgctgagctgtagtcgagatgacctgcttaaagtgatcgacttgcgcactaacgccatcaagcagacatttagtgcgcctggattcaagtgtgggtctgactggacacgggtcgtcttctcccctgacggcagttacgtggccgccggatcggccgagggctctctgtacatctggagtgtccttacagggaaggtggaaaaggtcctgtctaagcagcacagctcaagcataaacgccgtggcctggtcaccctctggcagccacgtggtctccgtggacaagggctgtaaggctgtgctctgggcacagtactag

SEQ ID NO: 345886 - DNA, 1875 bp, Artificial Sequence
  derived and/or modified sequence
atgagcagcggcctgcgggctgctgacttcccccgctggaagaggcacatcagcgagcagctgcggcggcgggaccggctgcagaggcaggcctttgaggagatcatcctgcagtacaacaagctgctggagaagagtgacctgcacagcgtgctggcccagaagctgcaggccgagaagcatgatgtgcccaacagacatgagatcagccctggccatgatggcacctggaatgacaaccagctgcaggagatggcccagctgcgcatcaagcaccaggaggagctgacagagctgcacaagaagagaggagagctggcccagctggtgattgacctgaacaaccagatgcagaggaaggaccgggagatgcagatgaatgaggccaagattgctgaatgtctgcagaccatcagtgacctggagacagagtgcctggacctgcggaccaagctgtgtgacctggagcgggccaaccagaccctgaaggatgaatatgatgccctgcagatcaccttcaccgccctggagggcaagctgaggaagaccacagaggagaaccaggagctggtgacccgctggatggccgagaaggcccaggaggccaaccggctgaatgcagaaaatgagaaggacagcagaagacggcaggcccggctgcagaaggagctggccgaggccgccaaggagcccctgcctgtggagcaggatgatgacatcgaggtgattgtggatgagaccagtgaccacacagaggagaccagccctgtgcgggccatcagcagagctgccaccaagaggctgagccagcctgctgggggcctgctggacagcatcaccaacatcttcggcctgtctgagagccccctgctgggccaccacagcagcagtgatgctgcccggcggcgctctgtgtcctccttccctgtgccccaggacaacgtggacacccaccctggcagcggcaaggaggtgcgggtgcctgccacagccctgtgtgtgtttgatgcccatgatggagaggtgaatgctgtgcagttcagccctggcagccggctgctggccaccggcggcatggacagaagagtgaagctgtgggaggtgtttggagagaagtgtgagttcaagggcagcctgagcggcagcaatgccggcatcaccagcattgaatttgattctgctggcagctacctgctggccgccagcaatgactttgccagccgcatctggacagtggatgactaccgcctgcggcacaccctgaccggccacagcggcaaggtgctgagcgccaagttcctgctggacaatgcccgcatcgtgtctggcagccatgacaggaccctgaagctgtgggacctgcggagcaaggtgtgcatcaagacagtgtttgctggcagcagctgcaatgacatcgtgtgcacagagcagtgtgtgatgagcggccactttgacaagaagatccgcttctgggacatccgctctgagagcatcgtgcgggagatggagctgctgggcaagatcacagccctggacctgaaccctgagaggacagagctgctgagctgcagcagagatgacctgctgaaggtgattgacctgcggaccaatgccatcaagcagaccttcagcgcccctggcttcaagtgtggcagtgactggaccagggtggtgttctccccagatggcagctatgtggccgccggcagcgctgagggcagcctgtacatctggagcgtgctgaccgggaaggtggagaaggtgctgagcaagcagcacagcagcagcatcaatgctgtggcctggagccccagcggcagccacgtggtgtctgtggacaagggctgcaaggctgtgctgtgggcccagtactag

SEQ ID NO: 345887 - DNA, 1875 bp, Artificial Sequence
  derived and/or modified sequence
atgagcagcggcctgcgggccgccgacttcccccggtggaagcggcacatttccgagcagcttcgcaggcgggacagattgcagagacaagccttcgaggagatcatcctccagtataacaagctcctggagaagtccgacctccatagcgtattggcccaaaagctgcaggctgagaagcacgatgtccctaatcgccacgagatcagccccgggcacgacggaacgtggaatgataaccaactacaggagatggcgcagttacgaatcaagcaccaggaggaactgaccgagttgcacaaaaagaggggtgaactggcacagctagttatagacttgaacaatcaaatgcaaagaaaggacagagaaatgcaaatgaatgaagccaaaattgccgagtgccttcagacaatcagcgacctggagactgaatgtctggatctgaggacaaagctgtgtgatcttgagagagccaaccagacattaaaagacgagtacgatgctttacagattacctttaccgcactcgagggaaaacttagaaaaaccacagaagaaaatcaggagcttgttactcgttggatggcagagaaagcccaggaagcaaatcgcttgaacgccgaaaacgagaaagatagcagaagacggcaggccagactgcagaaggagttggctgaggcagctaaagaaccactcccagtggagcaagatgatgatattgaagttatcgttgatgaaacctccgaccacaccgaggagaccagtccggtcagagcaatctctcgggccgctacaaagcgcctgtctcagcccgccgggggactcctggacagcataactaatatcttcggcctgtccgaatcaccgcttctggggcaccattcgtcttctgacgccgccagaagacgaagtgttagttctttcccagttccccaggataatgtcgatacacacccaggctctgggaaagaggttagggtacccgctactgcactgtgtgtatttgatgcccatgacggagaagtgaacgcagtgcagttctcgcctggcagcaggttattagcgaccggcggaatggaccggagggtaaaactgtgggaagtgttcggagagaagtgcgagtttaagggatccttatccggaagcaatgccggcattacctctatcgagttcgactctgcaggcagctacctcctggcggcctctaatgacttcgccagtagaatctggaccgtggatgactataggctgaggcacactctcaccggccattcaggcaaggtcctatctgcaaaattcttgcttgataacgcccgtatcgtttctgggtcccatgatcggactctgaaattgtgggacctgcggtccaaagtttgcatcaagacagtgtttgccggctcttcctgtaacgacattgtgtgtacagaacagtgtgtgatgtctggtcacttcgacaaaaagatccgcttctgggacataaggtccgagtcaatagtgagggaaatggaactgctgggcaaaattaccgccttagacctgaatcctgagaggaccgagctgttgtcttgttccagggatgacctactcaaagttattgaccttagaactaacgccataaaacagactttcagtgctcctggttttaagtgcggcagcgactggacaagagtggtctttagtccagatggcagctatgtcgccgctggctccgcagagggctctctatatatctggagtgtactgaccgggaaggtcgaaaaggtgctgtccaagcagcatagttcttccattaacgccgtggcatggtcccccagcgggtcacacgtggtgagcgtggataaggggtgtaaggctgtgttgtgggctcaatattag

SEQ ID NO: 345888 - DNA, 1875 bp, Artificial Sequence
  derived and/or modified sequence
atgagttcaggattacgggctgcggacttccctcggtggaaacgacacatatcagagcagttgaggcggcgagacaggctgcagcggcaggcctttgaggagattattctgcaatataacaaattactggaaaagtccgacctacatagtgtgctcgcccagaaactccaggccgagaagcacgacgtgcccaatagacacgagatttcgcctgggcatgacggtacgtggaatgacaaccagctccaggagatggctcagttgaggataaagcaccaagaggagttgactgagttacataaaaagcgcggtgagctggcccaactggtgatcgatctgaacaatcaaatgcagagaaaggacagagaaatgcagatgaacgaagccaagattgcagagtgcctgcagaccatatcagacctggagactgaatgtctggatctgagaaccaagctctgcgacctggaacgagcgaaccagactctgaaagatgaatacgatgccctgcagattactttcactgcgctggaaggcaaactccgtaagacaacagaagagaatcaagagttggttactagatggatggccgagaaagcccaggaagccaataggctgaacgctgaaaacgaaaaagactctaggagacgccaagctaggctccagaaagaactggctgaagccgcaaaagagcctctgccagtggagcaggacgatgatatagaggtgattgtggatgagacctctgaccacactgaggaaactagcccagtgcgagccattagccgtgcggctaccaaacggctctctcagcctgcaggcggactgttagacagtatcactaatatttttggtctctcagagtcccccctgctgggacaccatagctcaagtgacgcagcccgaagacggagtgtctcctcttttccagtgcctcaggacaacgtcgatactcatcccggatctggcaaagaggtgcgagtgcccgcaacggccctctgcgtttttgatgcacacgacggggaagtcaatgcagttcagttctccccagggtcccggttactggccaccggcggtatggaccggagagttaagttatgggaggtgttcggagagaagtgtgaattcaagggaagcctgagtggtagtaatgccggtattacttctatcgagttcgactccgccggatcttacctgctggccgcttcaaacgatttcgcctcaagaatatggaccgttgacgactatagactcaggcatactctgaccgggcactcaggcaaggtacttagtgcgaagttcctgctcgataatgcccgaattgttagtggctctcatgataggacactgaagctttgggatctcaggagtaaggtttgtatcaagaccgtgttcgccggaagctcgtgcaatgacattgtttgcaccgaacagtgcgtgatgagcggacacttcgacaagaaaattcgattctgggacattaggtctgagtccatcgtgagggaaatggagctccttgggaaaattactgctctggacctaaaccctgagcgtaccgagttattgtcgtgcagccgggacgatctgctcaaagtaatcgatctccgcacgaacgccatcaagcagacatttagcgcccctgggttcaaatgtggatcagactggacgcgggtggtgttttcacccgatggctcttacgtcgcggcaggatcggccgagggctctctgtacatctggtccgtgcttaccggcaaggttgagaaagtgctgagcaagcaacactcttcctccattaacgctgtggcctggtccccttctgggagccacgtagtttctgtagacaaaggatgtaaggcagtcctttgggcccaatactag

SEQ ID NO: 345889 - DNA, 3313 bp, Artificial Sequence
  derived and/or modified sequence
gtgagctccgggattgccggcattcccgcttctgctggttgcttcatgctgcaggctgcggccgtcagccctcgctcgcattggtggcgctgaggtgccggggcagcaagtgacatgtcgtcgggcctccgcgccgctgacttcccccgctggaagcgccacatctcggagcaactgaggcgccgggaccggctgcagagacaggcgttcgaggagatcatcctgcagtataacaaattgctggaaaagtcagatcttcattcagtgttggcccagaaactacaggctgaaaagcatgacgtaccaaacaggcacgagataagtcccggacatgatggcacatggaatgacaatcagctacaagaaatggcccaactgaggattaagcaccaagaggaactgactgaattacacaagaaacgtggggagttagctcaactggtgattgacctgaataaccaaatgcagcggaaggacagggagatgcagatgaatgaagcaaaaattgcagaatgtttgcagactatctctgacctggagacggagtgcctagacctgcgcactaagctttgtgaccttgaaagagccaaccagaccctgaaggatgaatatgatgccctgcagatcacttttactgccttggagggaaaactgaggaaaactacggaagagaaccaggagctggtcaccagatggatggctgagaaagcccaggaagccaatcggcttaatgcagagaatgaaaaagactccaggaggcggcaagcccggctgcagaaagagcttgcagaagcagcaaaggaacctctaccagtcgaacaggatgatgacattgaggtcattgtggatgaaacttctgatcacacagaagagacctctcctgtgcgagccatcagcagagcagccactaagcgactctcgcagcctgctggaggccttctggattctatcactaatatctttggtctgtccgagtctccccttttgggacatcattcttcttctgatgctgccaggagacgctctgtctcttccttcccagtcccccaggacaatgtggatactcatcctggttctggtaaagaagtgagggtaccagctactgccttgtgtgtcttcgatgcacatgatggggaagtcaacgctgtgcagttcagtccaggttcccggttactggccactggaggcatggaccgcagggttaagctttgggaagtatttggagaaaaatgtgagttcaagggttccctatctggcagtaatgcaggaattacaagcattgaatttgatagtgctggatcttacctcttagcagcttcaaatgattttgcaagccgaatctggactgtggatgattatcgattacggcacacactcacgggacacagtgggaaagtgctgtctgctaagttcctgctggacaatgcgcggattgtctcaggaagtcacgaccggactctcaaactctgggatctacgcagcaaagtctgcataaagacagtgtttgcaggatccagttgcaatgatattgtctgcacagagcaatgtgtaatgagtggacattttgacaagaaaattcgtttctgggacattcgatcagagagcatagttcgagagatggagctgttgggaaagattactgccctggacttaaacccagaaaggactgagctcctgagctgctcccgtgatgacttgctaaaagttattgatctccgaacaaatgctatcaagcagacattcagtgcacctgggttcaagtgcggctctgactggaccagagttgtcttcagccctgatggcagttacgtggcggcaggctctgctgagggctctctgtatatctggagtgtgctcacagggaaagtggaaaaggttctttcaaagcagcacagctcatccatcaatgcggtggcgtggtcgccctctggctcgcacgttgtcagtgtggacaaaggatgcaaagctgtgctgtgggcacagtactgacggggctctcagggctgggaggaccccagtgccctcctcagaagaagcacatgggctcctgcagccctgtcctggcaggtgatgtgctgggtatagcatggacctcccagagaagctcaagctatgtggcactgtagctttgccgtgaatgggatttctgaagatttgactgaggtctctcttggcctggaagaataacactgaaaaaacctgacgctgcggtcacttagcagaggctcaggttcttgccttgggaaacactactagctctgaccttccatacctcacttgggggagcacagggccccgctgggcctcctcaccaacggcagtgccaaaatcagcccccacatcaaggtggtgttctctgtgctttctctcgtccttccaaagtcggttctggcctaacgcatgtcccaacaccttgggttcatttgcccggtgaactcactttaagcattggattaacggaaactcccgaactacagacccctccctggtgggttgcatgaatgtgtctcattactgctgaaatgtcctcacatctctttcactgttcttcagagctttctggctctctttcccccacaaaattcgacatatttaaaaatctccgtgtggctttaaaaaatggttttttgtttttttgtttttttgaggtgggagaggatgtgtgaaaatcttttccagggaaatgggttcgctgcagaggtaaggatgtgttcctgtatcgatctgcagacacccagaaggtgggtgcacactgcatgcttgggggtgccaagggattcgagacctccaacatacttgtctgaaggtggtgattctggccatggcccctctgccaagcctgtgtgcgatgcccttggtgctttagtgcaagaagcctaggctcagaagcacagcagcgccatctttccgtttcaggggttgtgatgaaggccaaggaaaaacatttatctttactattttacctacgtataaagttttagttcattgggtgtgcgaaacaccctttttatcacttttaaatttgcactttattttttttcttccatgcttgttctctggacatttggggatgtgagtgttagagctggtgagagaggagtcaggtggccttcccaccgatggtcctggcctccacctgccctctcttccctgcctgatcaccgctttccaatttgcccttcagagaacttaagtcaaggagagttgaaattcacaggccagggcacatcttttatttatttcattatgttggccaacagaacttgattgtaaataataataaagaaatctgttatatacttttcaaactcca

SEQ ID NO: 345890 - DNA, 1875 bp, Artificial Sequence
  derived and/or modified sequence
atgagcagcggcctgagagccgccgacttccccagatggaagagacacatcagcgagcagctgagaagaagagacagactgcagagacaggccttcgaggagatcatcctgcagtacaacaagctgctggagaagagcgacctgcacagcgtgctggcccagaagctgcaggccgagaagcacgacgtgcccaacagacacgagatcagccccggccacgacggcacctggaacgacaaccagctgcaggagatggcccagctgagaatcaagcaccaggaggagctgaccgagctgcacaagaagagaggcgagctggcccagctggtgatcgacctgaacaaccagatgcagagaaaggacagagagatgcagatgaacgaggccaagatcgccgagtgcctgcagaccatcagcgacctggagaccgagtgcctggacctgagaaccaagctgtgcgacctggagagagccaaccagaccctgaaggacgagtacgacgccctgcagatcaccttcaccgccctggagggcaagctgagaaagaccaccgaggagaaccaggagctggtgaccagatggatggccgagaaggcccaggaggccaacagactgaacgccgagaacgagaaggacagcagaagaagacaggccagactgcagaaggagctggccgaggccgccaaggagcccctgcccgtggagcaggacgacgacatcgaggtgatcgtggacgagaccagcgaccacaccgaggagaccagccccgtgagagccatcagcagagccgccaccaagagactgagccagcccgccggcggcctgctggacagcatcaccaacatcttcggcctgagcgagagccccctgctgggccaccacagcagcagcgacgccgccagaagaagaagcgtgagcagcttccccgtgccccaggacaacgtggacacccaccccggcagcggcaaggaggtgagagtgcccgccaccgccctgtgcgtgttcgacgcccacgacggcgaggtgaacgccgtgcagttcagccccggcagcagactgctggccaccggcggcatggacagaagagtgaagctgtgggaggtgttcggcgagaagtgcgagttcaagggcagcctgagcggcagcaacgccggcatcaccagcatcgagttcgacagcgccggcagctacctgctggccgccagcaacgacttcgccagcagaatctggaccgtggacgactacagactgagacacaccctgaccggccacagcggcaaggtgctgagcgccaagttcctgctggacaacgccagaatcgtgagcggcagccacgacagaaccctgaagctgtgggacctgagaagcaaggtgtgcatcaagaccgtgttcgccggcagcagctgcaacgacatcgtgtgcaccgagcagtgcgtgatgagcggccacttcgacaagaagatcagattctgggacatcagaagcgagagcatcgtgagagagatggagctgctgggcaagatcaccgccctggacctgaaccccgagagaaccgagctgctgagctgcagcagagacgacctgctgaaggtgatcgacctgagaaccaacgccatcaagcagaccttcagcgcccccggcttcaagtgcggcagcgactggaccagagtggtgttcagccccgacggcagctacgtggccgccggcagcgccgagggcagcctgtacatctggagcgtgctgaccggcaaggtggagaaggtgctgagcaagcagcacagcagcagcatcaacgccgtggcctggagccccagcggcagccacgtggtgagcgtggacaagggctgcaaggccgtgctgtgggcccagtactag

SEQ ID NO: 345891 - protein, 428 aa, Artificial Sequence
  derived and/or modified sequence
MSSGLRAADFPRWKRHISEQLRRRDRLQRQAFEEIILQYNKLLEKSDLHSVLAQKLQAEKHDVPNRHEIRRRQARLQKELAEAAKEPLPVEQDDDIEVIVDETSDHTEETSPVRAISRAATKRLSQPAGGLLDSITNIFGRRSVSSFPVPQDNVDTHPGSGKEVRVPATALCVFDAHDGEVNAVQFSPGITSIEFDSAGSYLLAASNDFASRIWTVDDYRLRHTLTGHSGKVLSAKFLLDNARIVSGSHDRTLKLWDLRSKVCIKTVFAGSSCNDIVCTEQCVMSGHFDKKIRFWDIRSESIVREMELLGKITALDLNPERTELLSCSRDDLLKVIDLRTNAIKQTFSAPGFKCGSDWTRVVFSPDGSYVAAGSAEGSLYIWSVLTGKVEKVLSKQHSSSINAVAWSPSGSHVVSVDKGCKAVLWAQY

SEQ ID NO: 345892 - DNA, 1287 bp, Artificial Sequence
  derived and/or modified sequence
atgtcatcggggctccgcgcagcagacttccctagatggaagcggcacatttcagagcagctgcgacgccgggacagactccagcgccaagcctttgaggagatcattttgcagtataacaaactgcttgaaaagtctgacctgcacagcgtgctggcccagaagcttcaggcggagaagcacgacgttcctaacaggcatgaaatacgacgaagacaggcccggctgcagaaagagctggccgaggccgctaaggaaccacttccagtggagcaagacgatgacattgaggtgatagtcgacgaaacctccgaccataccgaggaaacttcacccgtgcgggcgattagcagagccgcgaccaaaaggctttcccagcctgcaggagggctgctggatagcataactaacatattcggtcgacgcagcgtgagcagcttcccagttccccaggacaatgtagacacccacccaggatccggtaaagaagtcagggttccagctaccgccctgtgtgtcttcgatgcccacgatggggaagtgaacgccgttcaattctctcctggtataacatctatagagtttgacagcgcaggctcatacctcctagccgcttctaacgatttcgcgtcccgaatctggacagtagacgactacagacttagacataccctcacaggacatagcggaaaggtgctgtcggcaaagttcctcctggataacgctagaattgtatcaggtagtcacgaccgcactttgaagctgtgggacctccggtcaaaagtctgtatcaagaccgtgtttgcgggatctagttgcaacgacatcgtgtgtaccgaacagtgcgtcatgtctgggcacttcgacaaaaaaattcggttctgggacatcaggtctgagagcatcgttcgagaaatggaactcctgggaaagattactgccctagacctgaacccagaaaggaccgaattgctgagttgcagccgcgatgatcttcttaaggtgatcgatctccgaaccaacgccattaagcagacattttcagctccgggttttaagtgtggctccgattggacgcgggtggtgttctctcccgatggcagttacgttgcagcaggctctgccgagggtagcttgtatatttggtccgtgttaacaggcaaagttgaaaaagtgctctccaagcaacactctagcagtattaacgcagtggcctggagcccatccggatcccacgttgtgtctgtagacaagggatgtaaggctgtgctctgggcccagtactag

SEQ ID NO: 345893 - DNA, 1287 bp, Artificial Sequence
  derived and/or modified sequence
atgagcagcggcctgcgggctgctgacttcccccgctggaagaggcacatcagcgagcagctgcggcggcgggaccggctgcagaggcaggcctttgaggagatcatcctgcagtacaacaagctgctggagaagagtgacctgcacagcgtgctggcccagaagctgcaggccgagaagcatgatgtgcccaacagacatgagatcagaagacggcaggcccggctgcagaaggagctggccgaggccgccaaggagcccctgcctgtggagcaggatgatgacatcgaggtgattgtggatgagaccagtgaccacacagaggagaccagccctgtgcgggccatcagcagagctgccaccaagaggctgagccagcctgctgggggcctgctggacagcatcaccaacatctttggaagaagatctgtgagcagcttccctgtgccccaggacaacgtggacacccaccctggcagcggcaaggaggtgcgggtgcctgccacagccctgtgtgtgtttgatgcccatgatggagaggtgaatgctgtgcagttcagccctggcatcaccagcattgaatttgattctgctggcagctacctgctggccgccagcaatgactttgccagccgcatctggacagtggatgactaccgcctgcggcacaccctgaccggccacagcggcaaggtgctgagcgccaagttcctgctggacaatgcccgcatcgtgtctggcagccatgacaggaccctgaagctgtgggacctgcggagcaaggtgtgcatcaagacagtgtttgctggcagcagctgcaatgacatcgtgtgcacagagcagtgtgtgatgagcggccactttgacaagaagatccgcttctgggacatccgctctgagagcatcgtgcgggagatggagctgctgggcaagatcacagccctggacctgaaccctgagaggacagagctgctgagctgcagcagagatgacctgctgaaggtgattgacctgcggaccaatgccatcaagcagaccttcagcgcccctggcttcaagtgtggcagtgactggaccagggtggtgttctccccagatggcagctatgtggccgccggcagcgctgagggcagcctgtacatctggagcgtgctgaccgggaaggtggagaaggtgctgagcaagcagcacagcagcagcatcaatgctgtggcctggagccccagcggcagccacgtggtgtctgtggacaagggctgcaaggctgtgctgtgggcccagtactag

SEQ ID NO: 345894 - DNA, 1287 bp, Artificial Sequence
  derived and/or modified sequence
atgagcagcggcctgcgggccgccgacttcccccggtggaagcggcacatttccgaacagctcagacggagagacagacttcaaagacaggcattcgaggaaattatccttcagtacaacaaactgctcgagaagtcagatcttcactcagtcctggctcagaagctccaggccgaaaagcatgacgttccaaacaggcacgaaattaggcgacgacaagccagattgcagaaagaactcgcagaggctgccaaagaaccgctccccgttgaacaagatgatgacatagaagtgatagtggacgagacgtccgatcacactgaagagaccagccccgtgagagccattagtcgggccgccaccaaacggctgtcccagccagcaggcggtctgctggactcaataacaaacatattcgggcgaagatccgtgagttcatttcccgtgccccaggacaatgtggatactcatcccggctcaggtaaagaggtccgggtgcccgcgactgctctctgtgtgttcgatgctcatgacggcgaggtcaacgccgttcaattctcaccaggaatcaccagtatcgagttcgactctgcaggcagttaccttctagccgcctctaacgattttgcaagtcgtatctggaccgtcgatgactatcgcctgcgccacaccctgaccggccactcaggaaaggtgttgtccgctaagtttcttcttgataacgcccgcattgtgagcggttcccatgaccgaacactcaagctatgggacctgaggtccaaagtctgtataaaaactgttttcgccgggagtagctgcaatgatatcgtgtgcacggagcaatgtgtcatgagcggacactttgataagaaaattaggttctgggatatccgcagtgagtcgatcgtacgtgaaatggaactgctgggcaaaattacagcacttgaccttaatcctgagcgcactgaactgctttcttgctccagagacgatctgttaaaggtgattgatctgagaaccaacgccattaaacagacctttagcgctcctggcttcaaatgtggctccgactggacgcgagtggtattttctcccgatgggtcttacgtagccgccggctccgcggaaggctctctatatatctggtccgtgctgactgggaaggtggagaaagtgttgagcaagcagcattcgtcatctataaatgcagtggcctggtcgccctcaggctctcatgtcgtgagcgttgacaaggggtgcaaggccgtgctgtgggctcagtactag

SEQ ID NO: 345895 - DNA, 1287 bp, Artificial Sequence
  derived and/or modified sequence
atgtcctcgggactgcgagcggcagacttccctcgatggaaacggcacatttctgagcaactccgcagacgggatagactccagcggcaagcattcgaggaaatcattctacagtacaacaaactgctcgagaaatcagacctgcattccgtgttggcgcaaaagcttcaggcagaaaagcatgacgttcccaatcggcacgagatcagaagacgtcaggcccgactgcagaaagagctggcagaagctgctaaggaacccctgccagtggaacaggacgacgacattgaagtgatagtggacgagaccagtgatcacactgaagaaacgagcccagtgagagcgatctcacgcgctgccactaaacggctgagccagcccgcaggcggtctgctcgacagtattacaaatatcttcggaagacggtccgtctcttccttcccagtgccccaagataatgtggatacccaccctggatctggcaaggaggttcgggtccctgcaacagccctgtgcgtattcgacgctcacgatggtgaggtcaatgccgtgcagttctctcctgggataacttccatcgagttcgatagcgccggatcctacctattggccgcatcaaatgacttcgctagtcgcatctggacagtcgacgactaccggctgcgccacactctaaccgggcactccggaaaagttctgagcgccaagtttctcctggacaacgccaggatcgtcagtggcagccatgataggactctgaagctttgggacctgcgtagcaaagtgtgcattaagacagtattcgctggaagcagttgcaatgacatcgtatgcactgagcagtgcgtcatgagcggccacttcgacaaaaagatccgcttttgggatatccggagtgaatctattgtcagagagatggagctgctcgggaagattactgcactcgacctgaatcccgaaaggactgagctgctgtcctgcagccgggacgatctgctcaaagtgatcgacctaagaacaaatgctatcaaacagacattcagcgctccaggattcaagtgtggtagcgattggacccgcgtagtgtttagcccagatggatcctacgtagccgctggaagcgcagagggcagtttgtacatctggtcagtcctgaccggcaaggttgagaaggtccttagtaaacagcacagctcaagcatcaatgcagtggcttggagtcctagcgggtcccatgttgtctccgtagataaaggatgcaaagctgtcttgtgggcccagtactag

SEQ ID NO: 345896 - DNA, 2366 bp, Artificial Sequence
  derived and/or modified sequence
agccatcagcagagcagccactaagcgactctcgcagcctgctggaggccttctggattctatcactaatatctttgggagacgctctgtctcttccttcccagtcccccaggacaatgtggatactcatcctggttctggtaaagaagtgagggtaccagctactgccttgtgtgtcttcgatgcacatgatggggaagtcaacgctgtgcagttcagtccaggttcccggttactggccactggaggcatggaccgcagggttaagctttgggaagtatttggagaaaaatgtgagttcaagggttccctatctggcagtaatgcaggaattacaagcattgaatttgatagtgctggatcttacctcttagcagcttcaaatgattttgcaagccgaatctggactgtggatgattatcgattacggcacacactcacgggacacagtgggaaagtgctgtctgctaagttcctgctggacaatgcgcggattgtctcaggaagtcacgaccggactctcaaactctgggatctacgcagcaaagtctgcataaagacagtgtttgcaggatccagttgcaatgatattgtctgcacagagcaatgtgtaatgagtggacattttgacaagaaaattcgtttctgggacattcgatcagagagcatagttcgagagatggagctgttgggaaagattactgccctggacttaaacccagaaaggactgagctcctgagctgctcccgtgatgacttgctaaaagttattgatctccgaacaaatgctatcaagcagacattcagtgcacctgggttcaagtgcggctctgactggaccagagttgtcttcagccctgatggcagttacgtggcggcaggctctgctgagggctctctgtatatctggagtgtgctcacagggaaagtggaaaaggttctttcaagcagcacagctcatccatcaatgcggtggcgtggtcgccctctggctcgcacgttgtcagtgtggacaaaggatgcaaagctgtgctgtgggcacagtactgacggggctctcagggctgggaggaccccagtgccctcctcagaagaagcacatgggctcctgcagccctgtcctggcaggtgatgtgctgggtatagcatggacctcccagagaagctcaagctatgtggcactgtagctttgccgtgaatgggatttctgaagatttgactgaggtctctcttggcctggaagaataacactgaaaaaacctgacgctgcggtcacttagcagaggctcaggttcttgccttgggaaacactactagctctgaccttccatacctcacttgggggagcacagggccccgctgggcctcctcaccaacggcagtgccaaaatcagcccccacatcaaggtggtgttctctgtgctttctctcgtccttccaaagtcggttctggcctaacgcatgtcccaacaccttgggttcatttgcccggtgaactcactttaagcattggattaacggaaactcccgaactacagacccctccctggtgggttgcatgaatgtgtctcattactgctgaaatgtcctcacatctctttcactgttcttcagagctttctggctctctttcccccacaaaattcgacatatttaaaaatctccgtgtggctttaaaaaatggttttttgtttttttgtttttttgaggtgggagaggatgtgtgaaaatcttttccagggaaatgggttcgctgcagaggtaaggatgtgttcctgtatcgatctgcagacacccagaaggtgggtgcacactgcatgcttgggggtgccaagggattcgagacctccaacatacttgtctgaaggtggtgattctggccatggcccctctgccaagcctgtgtgcgatgcccttggtgctttagtgcaagaagcctaggctcagaagcacagcagcgccatctttccgtttcaggggttgtgatgaaggccaaggaaaaacatttatctttactattttacctacgtataaagttttagttcattgggtgtgcgaaacaccctttttatcacttttaaatttgcactttattttttttcttccatgcttgttctctggacatttggggatgtgagtgttagagctggtgagagaggagtcaggtggccttcccaccgatggtcctggcctccacctgccctctcttccctgcctgatcaccgctttccaatttgcccttcagagaacttaagtcaaggagagttgaaattcacaggccagggcacatcttttatttatttcattatgttggccaacagaacttgattgtaaataataataaagaaatctgttatatacttttc

SEQ ID NO: 345897 - DNA, 2767 bp, Artificial Sequence
  derived and/or modified sequence
aagaccgtcccggatggcctcggggactgccagtgtgtggaggtgagctccgggattgccggcattcccgcttctgctggttgcttcatgctgcaggctgcggccgtcagccctcgctcgcattggtggcgctgaggtgccggggcagcaagtgacatgtcgtcgggcctccgcgccgctgacttcccccgctggaagcgccacatctcggagcaactgaggcgccgggaccggctgcagagacaggcgttcgaggagatcatcctgcagtataacaaattgctggaaaagtcagatcttcattcagtgttggcccagaaactacaggctgaaaagcatgacgtaccaaacaggcacgagataaggaggcggcaagcccggctgcagaaagagcttgcagaagcagcaaaggaacctctaccagtcgaacaggatgatgacattgaggtcattgtggatgaaacttctgatcacacagaagagacctctcctgtgcgagccatcagcagagcagccactaagcgactctcgcagcctgctggaggccttctggattctatcactaatatctttgggagacgctctgtctcttccttcccagtcccccaggacaatgtggatactcatcctggttctggtaaagaagtgagggtaccagctactgccttgtgtgtcttcgatgcacatgatggggaagtcaacgctgtgcagttcagtccaggaattacaagcattgaatttgatagtgctggatcttacctcttagcagcttcaaatgattttgcaagccgaatctggactgtggatgattatcgattacggcacacactcacgggacacagtgggaaagtgctgtctgctaagttcctgctggacaatgcgcggattgtctcaggaagtcacgaccggactctcaaactctgggatctacgcagcaaagtctgcataaagacagtgtttgcaggatccagttgcaatgatattgtctgcacagagcaatgtgtaatgagtggacattttgacaagaaaattcgtttctgggacattcgatcagagagcatagttcgagagatggagctgttgggaaagattactgccctggacttaaacccagaaaggactgagctcctgagctgctcccgtgatgacttgctaaaagttattgatctccgaacaaatgctatcaagcagacattcagtgcacctgggttcaagtgcggctctgactggaccagagttgtcttcagccctgatggcagttacgtggcggcaggctctgctgagggctctctgtatatctggagtgtgctcacagggaaagtggaaaaggttctttcaaagcagcacagctcatccatcaatgcggtggcgtggtcgccctctggctcgcacgttgtcagtgtggacaaaggatgcaaagctgtgctgtgggcacagtactgacggggctctcagggctgggaggaccccagtgccctcctcagaagaagcacatgggctcctgcagccctgtcctggcaggtgatgtgctgggtatagcatggacctcccagagaagctcaagctatgtggcactgtagctttgccgtgaatgggatttctgaagatttgactgaggtctctcttggcctggaagaataacactgaaaaaacctgacgctgcggtcacttagcagaggctcaggttcttgccttgggaaacactactagctctgaccttccatacctcacttgggggagcacagggccccgctgggcctcctcaccaacggcagtgccaaaatcagcccccacatcaaggtggtgttctctgtgctttctctcgtccttccaaagtcggttctggcctaacgcatgtcccaacaccttgggttcatttgcccggtgaactcactttaagcattggattaacggaaactcccgaactacagacccctccctggtgggttgcatgaatgtgtctcattactgctgaaatgtcctcacatctctttcactgttcttcagagctttctggctctctttcccccacaaaattcgacatatttaaaaatctccgtgtggctttaaaaaatggttttttgtttttttgtttttttgaggtgggagaggatgtgtgaaaatcttttccagggaaatgggttcgctgcagaggtaaggatgtgttcctgtatcgatctgcagacacccagaaggtgggtgcacactgcatgcttgggggtgccaagggattcgagacctccaacatacttgtctgaaggtggtgattctggccatggcccctctgccaagcctgtgtgcgatgcccttggtgctttagtgcaagaagcctaggctcagaagcacagcagcgccatctttccgtttcaggggttgtgatgaaggccaaggaaaaacatttatctttactattttacctacgtataaagttttagttcattgggtgtgcgaaacaccctttttatcacttttaaatttgcactttattttttttcttccatgcttgttctctggacatttggggatgtgagtgttagagctggtgagagaggagtcaggtggccttcccaccgatggtcctggcctccacctgccctctcttccctgcctgatcaccgctttccaatttgcccttcagagaacttaagtcaaggagagttgaaattcacaggccagggcacatcttttatttatttcattatgttggccaacagaacttgattgtaaataataataaagaaatctgttatatacttttcaaactcca

SEQ ID NO: 345898 - DNA, 1287 bp, Artificial Sequence
  derived and/or modified sequence
atgagcagcggcctgagagccgccgacttccccagatggaagagacacatcagcgagcagctgagaagaagagacagactgcagagacaggccttcgaggagatcatcctgcagtacaacaagctgctggagaagagcgacctgcacagcgtgctggcccagaagctgcaggccgagaagcacgacgtgcccaacagacacgagatcagaagaagacaggccagactgcagaaggagctggccgaggccgccaaggagcccctgcccgtggagcaggacgacgacatcgaggtgatcgtggacgagaccagcgaccacaccgaggagaccagccccgtgagagccatcagcagagccgccaccaagagactgagccagcccgccggcggcctgctggacagcatcaccaacatcttcggcagaagaagcgtgagcagcttccccgtgccccaggacaacgtggacacccaccccggcagcggcaaggaggtgagagtgcccgccaccgccctgtgcgtgttcgacgcccacgacggcgaggtgaacgccgtgcagttcagccccggcatcaccagcatcgagttcgacagcgccggcagctacctgctggccgccagcaacgacttcgccagcagaatctggaccgtggacgactacagactgagacacaccctgaccggccacagcggcaaggtgctgagcgccaagttcctgctggacaacgccagaatcgtgagcggcagccacgacagaaccctgaagctgtgggacctgagaagcaaggtgtgcatcaagaccgtgttcgccggcagcagctgcaacgacatcgtgtgcaccgagcagtgcgtgatgagcggccacttcgacaagaagatcagattctgggacatcagaagcgagagcatcgtgagagagatggagctgctgggcaagatcaccgccctggacctgaaccccgagagaaccgagctgctgagctgcagcagagacgacctgctgaaggtgatcgacctgagaaccaacgccatcaagcagaccttcagcgcccccggcttcaagtgcggcagcgactggaccagagtggtgttcagccccgacggcagctacgtggccgccggcagcgccgagggcagcctgtacatctggagcgtgctgaccggcaaggtggagaaggtgctgagcaagcagcacagcagcagcatcaacgccgtggcctggagccccagcggcagccacgtggtgagcgtggacaagggctgcaaggccgtgctgtgggcccagtactag

SEQ ID NO: 345899 - DNA, 1521 bp, Artificial Sequence
  derived and/or modified sequence
atgtgccactggaatacgtcagctatggggccatcagcattgagggggcatggctgaaatggggccccaaacggccccctctgtcctctccaccttcctcctgggtgccctgctcctctctggaccaggaggcatctggtttgagccccgaaagcccaagtccttgaccagagaagggcgcctgttctcagggaaagccactgcacaggacagctgtcaaaccacgtggtctctgggcaccttcttagtcctgagcttgaatgaggggcgagtgagtggccactgtttcttctgagtcagcagcgaagggcagttacctttggggcttgcaggcaaaattctcaaccaacagctaccacgcacttggcggggccgcctctcgtgctttatatttgagaaatatgtgcttcgtgtcttttttagaaggtgtagtgaacttcatacaattcttctggtctactgggcgcacacttcagtgtatgtcactctgacctgcgccttccgctatggccaagaggacattgacgtgatcggcttgaccttccgcagggacctgtacttctcccgggtccaggtgtatcctcctgtgggggccgcgagcacccccacaaaactgcaagagagcctgcttaaaaagctggggagcaacacgtacccctttctcctgacgtttcctgactacttgccctgttcagtgatgttgcagccagctccacaagattcagggaagtcctgtggggttgactttgaggtcaaagcattcgccacagacagcaccgatgccgaagaggacaaaatccccaagaagagctccgtgcgattactgatccgcaaagtacagcatgccccacttgagatgggtccccagccccgagctgaggcggcctggcagttcttcatgtctgacaagcccctgcaccttgcggtctctctcaacaaagagatctatttccatggggagcccatccctgtgaccgtgactgtcaccaataacacagagaagaccgtgaagaagattaaagcattcgtggaacaggtggccaatgtggttctctactcgagtgattattacgtcaagcccgtggctatggaggaagcgcaagaaaaagtgccaccaaacagcactttgaccaagacgctgacgctgctgcccttgctggctaacaatcgagaaaggagaggcattgccctggatgggaaaatcaagcacgaggacacaaaccttgcctccagcaccatcattaaggagggcatagaccggaccgtcctgggaatcctggtgtcttaccagatcaaggtgaagctcacagtgtcaggctttctgggagagctcacctccagtgaagtcgccactgaggtcccattccgcctcatgcaccctcagcctgaggacccaggtaaatgaagcagcaaaaataatataggtgaaatctcagaaattctgaagaaacattctctgcatcgaggcagcttagttgacgggaaagaaaaacagatctgtctaaatgagaactctccgta

SEQ ID NO: 345900 - DNA, 510 bp, Artificial Sequence
  derived and/or modified sequence
atggccgcaagtggaaaaaccagtaaatcagagcctaaccacgtgatttttaagaaaatctccagggataaatctgttactatatacctcgggaaccgcgattatattgatcatgtgtcacaggtacaacccgtggatggagttgtcctagttgatccagacctggtgaagggaaagaaggtatatgtgactctgacatgcgcatttcgctatggccaagaggacatcgacgttattggactgaccttccgacgcgatctctatttctcccgagtccaagtctatccacccgtaggcgcagcctcgactccaactaagcttcaagagagtctcctcaagaaactcggctcaaacacataccccttcctcctgaccttcccagattaccttccttgttccgtgatgcttcagcccgccccccaagactctgggaaatcttgtggcgtggattttgaagtcaaagcatttgccaccgattcgaccgatgcagaggaagacaaaatcccctag

SEQ ID NO: 345901 - DNA, 204 bp, Artificial Sequence
  derived and/or modified sequence
atggccgcctcgggtaaaacatctaaaagtgaaccgaaccacgttatctttaagaaaattagccgtgacaagtccgtatcaggagcccaggttactatctatctgggcaaccgtgactacatcgatcatgtatcccaggtccagcctgtcgacggggtcgtactggtggaccccgaccttgttaagggcaagaaggtgtcctag

SEQ ID NO: 345902 - DNA, 510 bp, Artificial Sequence
  derived and/or modified sequence
atggccgccagcggcaagaccagcaagtctgagcccaaccacgtgatcttcaagaagatcagccgggacaagtctgtgaccatctacctgggcaacagagactacatcgaccacgtgtcccaggtgcagcctgtggatggagtggtgctggtggaccctgacctggtgaagggcaagaaggtgtatgtgaccctgacctgtgccttccgctatggccaggaggacattgatgtgattggcctgaccttccggcgggacctgtacttcagccgggtgcaggtgtacccacctgtgggcgccgccagcacccccaccaagctgcaggagagcctgctgaagaagctgggcagcaacacctaccccttcctgctgaccttcccagactacctgccctgcagcgtgatgctgcagcctgccccccaggacagcggcaagagctgtggggtggactttgaggtgaaggcctttgccacagacagcacagatgctgaggaggacaagatcccctag

SEQ ID NO: 345903 - DNA, 204 bp, Artificial Sequence
  derived and/or modified sequence
atggccgccagcggcaagaccagcaagtctgagcccaaccacgtgatcttcaagaagatcagccgggacaagtctgtgtctggggcccaggtgaccatctacctgggcaacagagactacatcgaccacgtgtcccaggtgcagcctgtggatggagtggtgctggtggaccctgacctggtgaagggcaagaaggtgtcctag

SEQ ID NO: 345904 - DNA, 510 bp, Artificial Sequence
  derived and/or modified sequence
atggccgccagcggcaagaccagcaagagcgagcccaaccacgtgatcttcaagaagatctcacgagacaaatccgtgaccatttatttaggcaatcgcgactacatcgatcacgtctcacaagttcagcccgtcgacggtgtagtgctcgtcgatccagatctggttaagggaaaaaaagtctacgtaacactcacttgtgcctttcggtacggccaggaggacatagacgtgatcggcctaaccttcagaagagatctgtacttttctagggtacaggtctatccacccgttggcgccgcctccacccctacaaagctgcaggaatctctgctgaagaaacttggctccaatacctaccccttcctcctcacttttccggactacctgccctgtagtgtgatgcttcaacctgccccacaagattcaggaaagtcttgcggggtcgacttcgaggtgaaagctttcgcaaccgattctaccgacgctgaagaggacaagatcccctag

SEQ ID NO: 345905 - DNA, 204 bp, Artificial Sequence
  derived and/or modified sequence
atggccgccagcggcaagaccagcaagagcgagcccaaccacgtgatttttaagaagatttcgagagacaaatccgtctccggagcacaagtgacgatatatctcgggaaccgggattatatcgaccatgtgagccaggttcagcctgtcgacggggtagtcctggtcgaccccgatttggttaagggaaaaaaggttagttag

SEQ ID NO: 345906 - DNA, 510 bp, Artificial Sequence
  derived and/or modified sequence
atggcagcttctggcaagacatcaaaatccgaaccaaaccacgtcattttcaaaaagatttcgcgcgataaatccgtgacaatctatcttggaaaccgcgattacatcgatcatgtctcccaggtgcagccggtggatggagtcgtattggtcgacccagatttggtgaaaggcaagaaagtgtacgtgacactcacgtgtgcttttcgttatggacaggaggacattgacgtaatcgggctcacattcagacgggatctctacttctcccgggtgcaggtctacccacctgtcggagctgcttctacgcccactaagctgcaggaatccctccttaaaaagcttggatccaacacgtatccatttctgctcacattccccgattatctcccttgtagtgtcatgctccagccagcccctcaggacagtggaaaaagctgcggagtcgactttgaagtgaaagcgtttgctaccgactctacagacgctgaagaggataagattccctag

SEQ ID NO: 345907 - DNA, 204 bp, Artificial Sequence
  derived and/or modified sequence
atggcagcctctgggaagacctctaagagcgagcctaatcatgtgattttcaagaaaatttcgcgggataaatccgtgtccggagctcaagtaactatctacctaggaaacagagactacatcgaccacgtgagccaggtgcagcctgtggatggtgtggtcctggtcgaccctgacctggtgaagggcaaaaaggtttcctag

SEQ ID NO: 345908 - DNA, 791 bp, Artificial Sequence
  derived and/or modified sequence
gagacctggatgctgggcatcctcgctagatcccctacaaattccccacatacgtaggccaggagcctcagcggtgccccttcaggctcatctggcaagacggtaccagcttgctcagaacaggggctggctattcatcatctcagagcatagagaccctctccttgccacccggcccttcccacctggttggtgacaaatcacaaggattgtcttacctttctccaaccctctaacacctgaccaacaccccaaggtggtagaagttgccagggacagataacatggcagccagcgggaagaccagcaagtccgaaccgaaccatgttatcttcaagaagatctcccgggacaaatcggtgaccatctacctggggaacagagactacatagaccatgtcagccaagtccagcctgtggatggtgtcgtgttggttgatcctgatcttgtgaagggaaagaaagtgtatgtcactctgacctgcgccttccgctatggccaagaggacattgacgtgatcggcttgaccttccgcagggacctgtacttctcccgggtccaggtgtatcctcctgtgggggccgcgagcacccccacaaaactgcaagagagcctgcttaaaaagctggggagcaacacgtacccctttctcctgacgtttcctgactacttgccctgttcagtgatgttgcagccagctccacaagattcagggaagtcctgtggggttgactttgaggtcaaagcattcgccacagacagcaccgatgccgaagaggacaaaatcccc

SEQ ID NO: 345909 - DNA, 510 bp, Artificial Sequence
  derived and/or modified sequence
atggccgccagcggcaagaccagcaagagcgagcccaaccacgtgatcttcaagaagatcagcagagacaagagcgtgaccatctacctgggcaacagagactacatcgaccacgtgagccaggtgcagcccgtggacggcgtggtgctggtggaccccgacctggtgaagggcaagaaggtgtacgtgaccctgacctgcgccttcagatacggccaggaggacatcgacgtgatcggcctgaccttcagaagagacctgtacttcagcagagtgcaggtgtacccccccgtgggcgccgccagcacccccaccaagctgcaggagagcctgctgaagaagctgggcagcaacacctaccccttcctgctgaccttccccgactacctgccctgcagcgtgatgctgcagcccgccccccaggacagcggcaagagctgcggcgtggacttcgaggtgaaggccttcgccaccgacagcaccgacgccgaggaggacaagatcccctag

SEQ ID NO: 345910 - DNA, 204 bp, Artificial Sequence
  derived and/or modified sequence
atggccgccagcggcaagaccagcaagagcgagcccaaccacgtgatcttcaagaagatcagcagagacaagagcgtgagcggcgcccaggtgaccatctacctgggcaacagagactacatcgaccacgtgagccaggtgcagcccgtggacggcgtggtgctggtggaccccgacctggtgaagggcaagaaggtgagctag

SEQ ID NO: 345911 - protein, 235 aa, Artificial Sequence
  derived and/or modified sequence
MLQPAPQDSGKSCGVDFEVKAFATDSTDAEEDKIPKKSSVRLLIRKVQHAPLEMGPQPRAEAAWQFFMSDKPLHLAVSLNKEIYFHGEPIPVTVTVTNNTEKTVKKIKAFVEQVANVVLYSSDYYVKPVAMEEAQEKVPPNSTLTKTLTLLPLLANNRERRGIALDGKIKHEDTNLASSTIIKEGIDRTVLGILVSYQIKVKLTVSGFLGELTSSEVATEVPFRLMHPQPEDPGK

SEQ ID NO: 345912 - DNA, 708 bp, Artificial Sequence
  derived and/or modified sequence
atgctccagcctgcccctcaggatagcggcaaaagctgtggagttgatttcgaagtgaaagcttttgcgacggacagtacagacgccgaggaagataagatcccaaagaagtcatcagtgcgcctgttaatacggaaggtccagcacgcacctcttgagatgggccctcagcccagggccgaggctgcctggcagttcttcatgtctgataaaccactacacctggcagtctcactgaataaagaaatttacttccacggagaacctatccccgtgacggtgacagtgacgaataacaccgaaaaaaccgtcaagaagataaaggcatttgtggaacaggtggcaaatgtggtcttgtattcatctgactattatgtaaagcccgtggcaatggaagaggcccaggaaaaagtaccccctaattccacactgaccaagacgctcacactgcttccactgctagcaaacaatcgggagaggagaggaattgccctcgatggtaagataaagcatgaggatacaaatctggccagcagcacaatcataaaagaagggattgaccgcacagtgcttgggatcctagtgtcctaccaaatcaaggtcaaacttaccgtgtcaggatttctcggtgaactcactagttctgaggtcgccacagaagtgcctttccgcctcatgcacccacagcctgaggacccaggcaaatag

SEQ ID NO: 345913 - DNA, 708 bp, Artificial Sequence
  derived and/or modified sequence
atgctgcagcctgccccccaggacagcggcaagagctgtggggtggactttgaggtgaaggcctttgccacagacagcacagatgctgaggaggacaagatccccaagaagagctctgtgcggctgctgatcaggaaggtgcagcacgcccccctggagatgggcccccagcccagggctgaggccgcctggcagttcttcatgtctgacaagcccctgcacctggccgtgtccctgaacaaggagatctacttccacggggagcccatccctgtgacagtgacagtgaccaacaacacagagaagacagtgaagaagatcaaggcctttgtggagcaggtggccaacgtggtgctgtacagcagtgactactacgtgaagcctgtggccatggaggaggcccaggagaaggtgccccccaacagcaccctgaccaagaccctgaccctgctgcccctgctggccaacaaccgggagcggcggggcatcgccctggatggcaagatcaagcatgaggacaccaacctggccagcagcaccatcatcaaggagggcatcgacagaacagtgctgggcatcctggtgtcctaccagatcaaggtgaagctgactgtgtctggcttcctgggggagctgaccagcagcgaggtggccacagaggtgcccttccggctgatgcacccccagccagaagatcctgggaagtag

SEQ ID NO: 345914 - DNA, 708 bp, Artificial Sequence
  derived and/or modified sequence
atgctgcagcccgccccccaggacagcggcaagagctgcggcgtggatttcgaagtaaaggctttcgcgactgatagcaccgatgcagaggaagataaaattcccaaaaaatcaagtgtgcgcctgctgatccgaaaagtccagcacgctcctctcgagatgggcccccagccaagggccgaggccgcctggcaattctttatgtctgacaaacctcttcacctggctgttagcctgaacaaggagatttacttccacggcgaacctatcccggtcaccgtgactgtgacaaacaacacagaaaaaaccgttaaaaagatcaaagccttcgtcgagcaggtcgcaaacgtggtcttgtattccagcgattactacgtgaagccagtggccatggaggaagcacaggagaaagttcctccaaatagtaccctaacgaaaacgctgacactcttgccattgcttgccaacaaccgggaacgacgaggtatcgcattagacggaaagatcaagcacgaggacactaatctggcgtcctccacaatcattaaagagggcattgatcggacagttctaggaattctagtgagctatcaaatcaaggttaaattgactgtttccggatttctgggggagctgacgagtagcgaggtagcgaccgaggtaccatttcggttaatgcacccccagcctgaggacccaggaaagtag

SEQ ID NO: 345915 - DNA, 708 bp, Artificial Sequence
  derived and/or modified sequence
atgttacagcccgcaccccaggattctggtaagtcctgcggtgtcgacttcgaggtgaaggcctttgccacagacagtacagacgccgaagaggataagatacctaaaaaatcatccgtgcggcttctcatccgaaaggtgcaacatgcccctttagaaatgggaccccagccccgtgctgaggcagcttggcagtttttcatgtccgacaaaccgctgcacctagccgtgtcgttgaacaaggagatatacttccatggcgagcctattcccgtcacagtaaccgttaccaataacacagaaaagactgtaaagaagattaaggccttcgtggagcaagtcgccaatgtggtcctctattcatctgattactacgtgaaacccgtggcaatggaggaagcccaggaaaaggtccccccaaactctactctcaccaaaaccctcactcttctgcctctccttgcaaacaaccgcgaaagacgtggcattgcccttgatgggaagataaaacatgaagacactaacttagcctcaagtaccattatcaaagaagggatcgataggacagtcttgggcattctcgtttcctatcagataaaagtgaaattgaccgtaagcgggtttctgggtgagctgacctcgtctgaggtcgccacagaggtgcccttcaggctgatgcacccccaacctgaggaccctggaaaatag

SEQ ID NO: 345916 - DNA, 708 bp, Artificial Sequence
  derived and/or modified sequence
atgctgcagcccgccccccaggacagcggcaagagctgcggcgtggacttcgaggtgaaggccttcgccaccgacagcaccgacgccgaggaggacaagatccccaagaagagcagcgtgagactgctgatcagaaaggtgcagcacgcccccctggagatgggcccccagcccagagccgaggccgcctggcagttcttcatgagcgacaagcccctgcacctggccgtgagcctgaacaaggagatctacttccacggcgagcccatccccgtgaccgtgaccgtgaccaacaacaccgagaagaccgtgaagaagatcaaggccttcgtggagcaggtggccaacgtggtgctgtacagcagcgactactacgtgaagcccgtggccatggaggaggcccaggagaaggtgccccccaacagcaccctgaccaagaccctgaccctgctgcccctgctggccaacaacagagagagaagaggcatcgccctggacggcaagatcaagcacgaggacaccaacctggccagcagcaccatcatcaaggagggcatcgacagaaccgtgctgggcatcctggtgagctaccagatcaaggtgaagctgaccgtgagcggcttcctgggcgagctgaccagcagcgaggtggccaccgaggtgcccttcagactgatgcacccccagcccgaggaccccggcaagtag
